(19) United States
(12) Patent Application Publication
(10) Pub. No.: US 2025/0268954 A1
(43) Pub. Date: Aug. 28, 2025

(54) Treatment and/or Prevention of Digestive Disorder by a Bacterial Composition of Propionibacterium Freudenreichii and Bifidobacterium Longum

(71) Applicants: ETH Zurich, Zürich (CH); UNIVERSITÄT ZÜRICH, Zürich (CH)

(72) Inventors: Christophe LACROIX, Kilchberg (CH); Vanesa ROCHA MARTIN, Zürich (CH); Christian BRAEGGER, Zürich (CH)

(73) Assignees: ETH Zurich, Zürich (CH); UNIVERSITÄT ZÜRICH, Zürich (CH)

(21) Appl. No.: 18/580,742

(22) PCT Filed: Jul. 20, 2022
(86) PCT No.: PCT/EP2022/070436

§ 371 Date: Jan. 19, 2024

(30) Foreign Application Priority Data
Jul. 20, 2021 (EP) 21186623.1

(51) Int. Cl. A61K 35/741; A61K 35/745; C12N 1/20; C12R 1/01

(52) U.S. Cl. CPC A61K 35/741; A61K 35/745; C12N 1/205; C12R 2001/01

(57) ABSTRACT

The novel invention is based, at least in part. on the surprising finding that the combination of bacterial strains comprising P. freudenreichii JS27 and B. longum subsp. infantis, particularly B. longum subsp. infantis TPY12-1 can be used in medicine and/or as a food supplement when grown simultaneously. As such and as shown in the description and appended examples, growth and viability of bacterial strains possessing synergistic behavior can be enhanced in the human gut and thus can increase bioavailability as compared with alternative combinations of bacteria.

### CROSS REFERENCE TO RELATED APPLICATION

[0001] This application is a national stage application in the U.S. filed under 35 U.S.C. § 371 of pending international application no. PCT/EP2022/069972 filed 17 Jul. 2022, which claims priority to European Patent Application Serial No. EP 21186274.3, filed 17 July Jun. 2021, the entireties of which applications are hereby incorporated by reference herein.

### SEQUENCE LISTING

[0002] The instant application contains a Sequence Listing which has been submitted electronically in XML format and is hereby incorporate by reference in its entirety. Said XML copy, created on Jul. 19, 2024, is named 8445-0019_Sequence_Listing.xml and is 2602000 bytes in size.

### FIELD OF THE INVENTION

[0003] The present invention relates to a bacterial composition and a method for co-cultivating such a composition. The invention further relates to the use of the composition for the treatment and/or prevention of a digestive disorder. Use of the composition as a food or food-ingredient is also provided.

### BACKGROUND OF THE INVENTION

[0004] Infant Colic (IC), a functional gastrointestinal disorder, has been suggested to be caused by an imbalanced composition of the gut microbiota with high abundance of enterobacteria and clostridia which could produce excessive intra-gastrointestinal gas and symptoms of bloating and intestinal inflammation (Savino et al. 2017; Gupta 2002; Lehtonen et al. 1994; Zeevenhooven et al. 2017 and 2018). Moreover, colicky infants experience prolonged and inconsolable crying, which are frequent trigger for abusive head trauma (“Shaken Baby Syndrome”) (Talvik et al. 2008; Barr et al. 2006). Identification of the gut microbiota in different sample groups, healthy control and breast-fed or formula-fed colic infants, confirmed higher abundance of gas-producing bacteria (e.g. saccharolytic Clostridium and Enterobacteriaceae) in the second group (de Weerth et al. 2013; Savino et al. 2009; Lehtonen et al. 1994). Those bacteria produce hydrogen (H₂) and the gas accumulation could contribute to bloating and stomach cramps (Fischbach and Sonnenburg 2011; R. Macfarlace and Gibson 1997; Mckay et al. 1982; Suzuki et al. 2018). Other symptoms suggesting a gastrointestinal disorder through gas accumulation in colicky infants include abdominal distention, flatulence and flexed legs (Gupta 2002; Hyman et al. 2006).

[0005] Moreover, according to Pham et al. 2017, higher abundance of H₂-producing lactate-utilizing bacteria Anaerobutyricum hallii and/or Veillonella have been observed in colic infants in comparison to healthy infants. H₂ accumulation, and thus bloating and crying of infants was suggested to be caused by an imbalance in H₂ production from lactate.

[0006] Probiotics are living microorganism which when administered in adequate amounts confer a health benefit on the host. Probiotics can be beneficial if consumed in sufficient quantities, and can thus be used against pathogenic bacteria (FAO/WHO 2002). A few digestive disorders affecting the gastrointestinal microbiota of infants are as followed: infant colic, necrotizing enterocolitis and sepsis. Well known probiotics are lactic acid producing strains of bacterial groups of lactobacilli and bifidobacteria. A common problem is the delivery of live bacteria to the gut through the gastrointestinal tract. In currently available bacterial compositions, only a small portion of the composition reaches the gut in a state where bacteria can exhibit their positive effects as food additives and/or on a digestive disease.

[0007] Therefore, there is a need for means and methods to improve digestion and the treatment of digesting disorders. In particular, there is a need for novel bacterial compositions showing an improved viability and/or activity for efficacy in the gut after oral intake.

### SUMMARY OF THE INVENTION

[0008] The invention relates to a novel bacterial composition comprising viable bacteria of the species Propionibacterium freudenreichii and Bifidobacterium longum subsp. infantis.

[0009] In another embodiment, the invention relates to a co-culture of viable bacteria of the species P. freudenreichii and B. longum subsp. infantis.

[0010] In a further embodiment, the invention relates to a method of co-cultivating bacteria of the species B. longum subsp. infantis and P. freudenreichii, the method comprising the steps of:
[0011] (a) providing a lactose-based cultivation medium;
[0012] (b) inoculating the medium of (a) with bacteria of the species P. freudenreichii and B. longum subsp. infantis;
[0013] (c) cultivating the inoculated medium of (b).

[0014] In a further embodiment, the invention relates to the use of the composition of the invention, the co-culture of the invention and/or the cultivated bacteria of the invention for delivering bacteria of the species P. freudenreichii and B. longum subsp. infantis to the gut after oral intake. A preferred use as provided herein is in the amelioration of digestive conditions in the human gut. It is preferred that the gut is of an infant, preferably of the age of 0 to 3 years.

[0015] In a further embodiment, the invention relates to the composition of the invention, the co-culture of the invention and/or the cultivated bacteria of the invention for use in medicine.

[0016] In a further embodiment, the invention relates to the composition of the invention, the co-culture of the invention and/or the cultivated bacteria of the invention for use in treating and/or preventing a digestive disorder. The digestive disorder may be lactose intolerance, colic, intestinal discomfort, intestinal pain, visceral sensitivity or intestinal cramp. In some embodiments, digestive disorder described herein is at least one selected from the group consisting of: lactose intolerance, colic, intestinal discomfort, intestinal pain, visceral sensitivity, intestinal cramp and irritable bowel syndrome. It is preferred within the present invention that the composition, co-culture or the cultivated bacteria for use as provided herein is formulated for oral administration. It is furthermore preferred that the composition, co-culture or the cultivated bacteria for use as provided herein is to be administered to an infant, preferably an infant of the age of 0 to 3 years.

[0017] It is preferred that the bacteria of the species P. freudenreichii are of the strain P. freudenreichii JS27. It is preferred that the bacteria of the species B. longum subsp. infantis are of the strain B. longum subsp. infantis CECT7210 IM1® (B. infantis IM1®) and/or TPY12-1.

[0018] The novel composition provided herein can be used in medicine and/or as a food supplement or food ingredient. As such and as shown in the appended examples, the invention is based, at least in part, on the surprising finding that the combination of bacteria of the species P. freudenreichii and B. longum subsp. infantis leads to a synergistic effect on growth and viability in the infant gut and thus an increased bioavailability as compared with alternative combinations of bacteria.

### DESCRIPTION OF THE INVENTION

[0019] Although methods and materials similar or equivalent to those described herein can be used in the practice or testing of the present invention, suitable methods and materials are described below. All publications, patent applications, patents, and other references mentioned herein are incorporated by reference in their entirety. The publications and applications discussed herein are provided solely for their disclosure prior to the filing date of the present application. Nothing herein is to be construed as an admission that the present invention is not entitled to antedate such publication by virtue of prior invention. In addition, the materials, methods, and examples are illustrative only and are not intended to be limiting.

[0020] In the case of conflict, the present specification, including definitions, will control. Unless defined otherwise, all technical and scientific terms used herein have the same meaning as is commonly understood by one of skill in art to which the subject matter herein belongs. As used herein, the following definitions are supplied in order to facilitate the understanding of the present invention.

[0021] Accordingly, the invention relates to, inter alia, the following embodiments:
[0022] 1. A bacterial composition comprising viable bacteria of the strain P. freudenreichii JS27 and of the species Bifidobacterium longum subsp. infantis.
[0023] 2. The composition of embodiment 1, wherein the bacteria of the strain P. freudenreichii JS27 is a bacterium comprising a 16S rDNA sequence as defined by SEQ ID NO: 7 or a sequence having at least 95% sequence identity to SEQ ID NO: 7, wherein the P. freudenreichii JS27 maintains being capable of growing in a colon and wherein post-stress survival is improved by co-culture of the bacterium of the species Bifidobacterium longum subsp. infantis.
[0024] 3. The composition of embodiment 2, wherein the bacteria of the strain P. freudenreichii JS27 is a bacterium comprising a sequence as defined by SEQ ID NO: 7.
[0025] 4. The composition of any one of the embodiments 1 to 3, wherein the bacteria of the species B. longum subsp. infantis are of the strain B. longum subsp. infantis TPY12-1.
[0026] 5. A co-culture of viable bacteria of the strain P. freudenreichii JS27 and of the species Bifidobacterium longum subsp. infantis.
[0027] 6. The co-culture of embodiment 5, wherein the bacteria of the strain P. freudenreichii JS27 is a bacterium comprising a sequence as defined by SEQ ID NO: 7 or a sequence having at least 95% sequence identity to SEQ ID NO: 7, wherein the P. freudenreichii JS27 maintains being capable of growing in a colon and wherein post-stress survival is improved by co-culture of the bacterium of the species Bifidobacterium longum subsp. infantis.
[0028] 7. The co-culture of embodiment 6, wherein the bacteria of the strain P. freudenreichii JS27 is a bacterium comprising a sequence as defined by SEQ ID NO: 7.
[0029] 8. The co-culture of any one of embodiments 5 to 7, wherein the bacteria of the species B. longum subsp. infantis are of the strain B. longum subsp. infantis TPY12-1.
[0030] 9. A method of co-cultivating bacteria of the strain P. freudenreichii JS27 and of the species B. longum subsp. infantis, the method comprising the steps of:
[0031] providing a cultivation medium;
[0032] inoculating the medium of (a) with bacteria of the strain P. freudenreichii JS27 and of the species B. longum subsp. infantis, preferably of the strain B. longum subsp. infantis TPY12-1;
[0033] cultivating the inoculated medium of (b).
[0034] 1. Use of the composition of any one of embodiments 1 to 4, or use of the co-culture of any one of embodiments 5 to 9 for delivering bacteria of the strain P. freudenreichii JS27 and of the species B. longum subsp. infantis to the gut, preferably after oral intake.
[0035] 2. Use of the composition of any one of embodiments 1 to 4, or use of the co-culture of any one of embodiments 5 to 9 in the amelioration of digestive conditions in the human gut.
[0036] 3. The use of embodiment 10 or 11, wherein the gut is of an infant.
[0037] 4. The use of embodiment 12, wherein the infant is of the age of 0 to 3 years.
[0038] 5. The composition of any one of embodiments 1 to 4 or the co-culture of any one of embodiments 5 to 9 for use in medicine.
[0039] 6. The composition of any one of embodiments 1 to 4 or the co-culture of any one of embodiments 5 to 9 for use in treating and/or preventing a digestive disorder.
[0040] 7. The composition or co-culture for use of embodiment 15, wherein the digestive disorder is lactose intolerance, colic, intestinal discomfort, intestinal pain, visceral sensitivity or intestinal cramp.
[0041] 8. The composition or co-culture for use of embodiment 15 or 16, wherein the composition, co-culture or the cultivated bacteria is formulated for gastrointestinal administration.
[0042] 9. The composition or co-culture for use of embodiment 17, wherein the gastrointestinal administration is oral administration.
[0043] 10. The composition, co-culture or the cultivated bacteria for use of any one of embodiments 15 to 18, wherein the composition or the co-culture is to be administered to an infant.
[0044] 11. The composition or the co-culture for use of embodiment 19, wherein the infant is of the age of 0 to 3 years.
[0045] 12. Use of the composition of any one of embodiments 1 to 4, or the co-culture of any one of embodiments 5 to 9 in a food product.

[0046] Accordingly, in one embodiment, the present invention relates to a bacterial composition comprising viable bacteria of the species Propionibacterium freudenreichii and Bifidobacterium longum subsp. infantis. As used herein, the term “viable bacteria”, refers to live bacteria, which are metabolically or physiologically active. Within the present invention, the composition comprises bacteria of the species P. freudenreichii, preferably of the strain P. freudenreichii JS27.

[0047] The inventors found that the combination of P. freudenreichii JS27 and Bifidobacterium longum subsp. infantis has specific synergistic effects that go beyond the sum of the two bacteria and beyond what the skilled person would expect from this combination. The inventors found (see FIG. 5) that for a combination of P. freudenreichii JS27 growth was much higher (>two-fold) and metabolite production was increased in culture media containing fermentation effluent (20 and 40%) compared to P. freudenreichii JS DSM 7067. Growth is a key pre-requirement for efficient colonization and high metabolic effect in the gut environment. Furthermore, P. freudenreichii JS27 and Bifidobacterium longum subsp. infantis synergistically improve each other's survival and growth (Example 2 and 3). This synergy is particularly pronounced for P. freudenreichii JS27 since other Propionibacterium freudenreichii such as P. freudenreichii JS DSM 7067 do not have comparable colonization properties in the gut. P. freudenreichii JS DSM 7067 does not substantially grow in experimental settings at 37° C. (see Example 6), therefore this synergistic effect was not to be expected for the person skilled in the art.

[0048] Accordingly, the invention is at least in part based on the synergistic effect of P. freudenreichii JS27 and Bifidobacterium longum subsp. infantis on the viability and activity in the gut.

[0049] In certain embodiments, the composition of the invention also comprises bacteria of the species B. longum subsp. infantis, preferably of the strain B. longum subsp. infantis CECT7210 IM1® or TPY12-1. As demonstrated in the appended examples, the invention is at least in part based on the surprising finding that a bacterial composition comprising viable bacteria of the species Propionibacterium freudenreichii and Bifidobacterium longum subsp. infantis shows an increased viability as compared to other bacterial compositions. In particular, it was surprisingly shown that the simultaneous cultivation of propionibacteria and bifidobacteria strains promoted growth of B. longum subsp. infantis in in vitro conditions mimicking the infant gut.

[0050] This effect is particularly pronounced in combinations comprising B. longum subsp. infantis TPY12-1, since the growth and metabolic activity in culture media containing 20 or 40% fermentation effluent from an infant gut fermentation model is higher (30 to 100% increase) compared to the other B. longum strains (FIG. 6).

[0051] As such, the data provided herein plausibly demonstrates that a composition or co-culture comprising these two bacteria leads to an increased availability in the human gut, in particular after gastrointestinal administration. The term “gastrointestinal administration”, as used herein, refers to route of administration in which the administered agent reaches the gastrointestinal tract in a substantial amount. In some embodiments, the gastrointestinal administration described herein is at least one route of administration selected from the group consisting of: oral administration, rectal administration, gastric feeding tube, gastrostomy, duodenal feeding tube and enteral administration. In some embodiments, rectal administration is achieved by a suppository. In some embodiments, oral administration is achieved by a capsule or a tablet.

[0052] Further, the invention relates to a co-culture of viable bacteria of the species Propionibacterium freudenreichii and Bifidobacterium longum subsp. infantis. As used herein, the term “co-culture”, refers to a physical embodiment comprising or containing the composition of the invention comprising Propionibacterium freudenreichii and Bifidobacterium longum subsp. infantis, preferably wherein one or both bacterial species are in a growth phase. The co-culture of the invention comprises bacteria of the species P. freudenreichii, preferably of the strain P. freudenreichii JS27. The co-culture of invention comprises bacteria of the species B. longum subsp. infantis, preferably of the strain B. longum subsp. infantis CECT7210 IM1® or TPY12-1.

[0053] The present invention further provides a method of co-cultivating bacteria of the species B. longum subsp. infantis and P. freudenreichii, the method comprising the steps of a) providing a lactose-based cultivation medium, b) inoculating the medium of (a) with bacteria of the species P. freudenreichii and B. longum subsp. infantis, and c) cultivating the inoculated medium of (b). As used herein, the term “cultivation medium” refers to a liquid or gel designed to support the growth and/or maintenance of bacteria. Any cultivation medium can be used within the present invention as long as it is able to support the growth of the bacteria of the species B. longum subsp. infantis and P. freudenreichii and preferably lactose based. Cultivation media as used herein can vary, inter alia, in pH, nutrient source, such as glucose concentration, lactate content, protein content, amino acid content, short-chain fatty acid content and/or growth factor content. The term “growth factor” refers to supplements which enhance the growth of bacteria in the cultivation medium. As used herein, the term “lactose-based cultivation medium” refers to a cultivation medium comprising bacteria, in particular of the species B. longum subsp. infantis and P. freudenreichii, which comprises lactose as main energy source. However, the medium may comprise one or more further energy sources such as glucose or fructose.

[0054] As such, the medium for culturing is not particularly limited, and a medium usually used for culture of such bacteria can be appropriately modified as required, and used, preferably the main energy and carbon source is lactose. However, as a primary or additional carbon source, for example, saccharides such as galactose, glucose, fructose, mannose, cellobiose, maltose, sucrose, trehalose, prebiotic oligosaccharides, such as fructooligosccharides, galactooligosaccharides and human milk oligosaccharides, starch, starch hydrolysate, and blackstrap molasses can be used according to the present invention. As a nitrogen source, organic nitrogen sources may be used, for example yeast extract, amino acids, peptones, protein hydrolysates. Further, as inorganic salts, for example, sodium chloride, potassium chloride, potassium phosphate, magnesium sulfate, calcium chloride, calcium nitrate, manganese chloride, ferrous sulfate, and so forth can be used. Furthermore, organic components such as peptone, soybean flour, defatted soybean meal, meat extract, and yeast extract may also be used.

[0055] Prior to inoculating the lactose-based medium with the bacteria, the bacteria may each individually be grown to provide a suitable starting population of bacteria. The skilled person is aware of means and methods suitable for individual growth of bacteria of the species P. freudenreichii and B. longum subsp. infantis. Exemplary media suitable for such use within the present invention may be based on yeast extract sodium lactate medium (YEL), Wilkens-Chalgren agar, or Man-Rogosa-Sharpe (MRS) broth.

[0056] The method of the invention further comprises the step of inoculating the medium with bacteria of the species P. freudenreichii and B. longum subsp. infantis. The term “inoculating” refers to the transfer of at least one bacterial cell able to proliferate from a stock or pre-culture to the lactose-based cultivation medium.

[0057] Further, the method of the invention comprises the step of cultivating the inoculated medium. The term “cultivating” refers to the maintenance and/or proliferation of the bacteria in the medium. Cultivation may be carried out for any duration allowing for proliferation of the bacteria. For example, the medium comprising the bacteria may be cultivated for at least 1, 2, 3, 4, 5, 6, 7, 8, 9, 10, 11, 12, 13, 14, 15, 16, 17, 18, 19, 20, 21, 22, 23, 24, 25, 26, 27, 28, 29, 30, 31, 32, 33, 34, 35, 36, 37, 38, 39, 40, 41, 42, 43, 44, 45, 46, 47, 48, 49, 50, 51, 52, 53, 54, 55, 56, 57, 58, 59, 60, 61, 62, 63, 64, 65, 66, 67, 68, 69, 70, 71, 72, 73, 74, 75, 76, 77, 78, 79, 80, 81, 82, 83, 84, 85, 86,87, 88, 89, 90, 91, 92, 93, 94, 95, 96, 97, 98, 99, 100, 101, 102, 103, 104, 105, 106, 107, 108, 109, 110, 111, 112, 113, 114, 115, 116, 117, 118, 119, 120, 121, 122, 123, 124, 125, 126, 127, 128, 129 or up to 130 h. It is preferred that incubation lasts for 24 to 120 h, more preferably for 48 to 96 h, even more preferably for 72 h. Incubation may be carried out at any temperature suitable to support the growth of the incubated bacteria. It is preferred, however, that incubation is carried out at a temperature of between 30 and 40° C., preferably at 37° C.

[0058] The invention also relates to the use of the composition of the invention, the co-culture of the invention or the cultivated bacteria of the invention for delivering bacteria of the species B. longum subsp. infantis and P. freudenreichii to the gut after oral intake. The composition of the invention, the co-culture of the invention or the cultivated bacteria of the invention are also provided as part of a suppository, in particular an infant suppository. The use of the suppository is also provided herein. As shown in the appended examples, bacteria of the species B. longum subsp. infantis and P. freudenreichii show an increased survival in conditions resembling the human gut after having been co-cultured. This surprising synergistic behavior results in an improved usability of the composition, co-culture and/or the co-cultured bacteria according to the invention over available compositions or co-cultures in that the availability of viable bacteria in the human gut is increased.

[0059] In certain embodiments, the invention relates to composition of the invention, the co-culture of the invention or the method of co-cultivating of the invention, wherein the bacteria of the strain P. freudenreichii JS27 is a bacterium comprising a sequence as defined by SEQ ID NO: 7 or a sequence having at least 80%, at least 85%, at least 90%, at least 95%, at least 96%, at least 97%, at least 98%, at least 99%, at least 99.1%, at least 99.2%, at least 99.3%, at least 99.4%, at least 99.5%, at least 99.6%, at least 99.7%, at least 99.8%, at least 99.9% sequence identity to SEQ ID NO: 7, wherein the P. freudenreichii JS27 maintains being capable of growing in a colon and wherein post-stress survival is improved by co-culture of the bacterium of the species Bifidobacterium longum subsp. infantis. The capability of growing in a colon is preferably examined in an assay for colon growth at 37° C., more preferably examined in an assay for infant colon growth at 37° C., more preferably in an assay as described in Example 3. In some embodiments, the post-stress survival described herein describes an assay modelling gastric stress conditions such as an assay as described in Example 3b). The improvement described in the context of post-stress survival, preferably refers to an improvement of at least about 10%, at least about 20%, at least about 30%, at least about 40%, at least about 50%, at least about 60% or at least about 70% of the co-culture compared to the single culture.

[0060] In certain embodiments, the invention relates to composition of the invention, the co-culture of the invention or the method of co-cultivating of the invention, wherein the bacteria of the strain B. longum subsp. infantis TPY12-1 is a bacterium comprising a sequence identical to the sequences characterizing B. longum subsp. infantis TPY12-1 in Bunesova V. et al. 2016 (Bunesova, V., Lacroix, C., Schwab, C. 2016. Fucosyllactose and L-fucose utilization of infant Bifidobacterium longum and Bifidobacterium kashiwanohense. BMC Microbiol 16, 248) or a sequence having at least 80%, at least 85%, at least 90%, at least 95%, at least 96%, at least 97%, at least 98%, at least 99%, at least 99.1%, at least 99.2%, at least 99.3%, at least 99.4%, at least 99.5%, at least 99.6%, at least 99.7%, at least 99.8%, at least 99.9% sequence identity to the sequences characterizing B. longum subsp. infantis TPY12-1 in Bunesova V et al. 2016 (Bunesova, V., Lacroix, C., Schwab, C. 2016. Fucosyllactose and L-fucose utilization of infant Bifidobacterium longum and Bifidobacterium kashiwanohense. BMC Microbiol 16, 248), wherein the B. longum subsp. infantis TPY12-1 maintains being capable of improving post-stress survival of the bacterium of the strain P. freudenreichii JS27 by co-culture.

[0061] “Percent (%) sequence identity” with respect to a reference sequence is defined as the percentage of residues in a candidate sequence that are identical with the residues in the reference sequence, after aligning the sequences and introducing gaps, if necessary, to achieve the maximum percent sequence identity, and not considering any conservative substitutions as part of the sequence identity. Alignment for purposes of determining percent sequence identity can be achieved in various ways that are within the skill in the art, for instance, using publicly available computer software such as BLAST, BLAST-2, ALIGN or Megalign (DNASTAR) software. Those skilled in the art can determine appropriate parameters for aligning sequences, including any algorithms needed to achieve maximal alignment over the full length of the sequences being compared.

[0062] The differences compared to the reference sequence (e.g. reference genome) may be the result of natural or engineered mutations that do not or not substantially limit the technical effect(s) described herein. As such, the mutations can comprise insertions, deletions and/or replacements of nucleotides in the reference genome sequences as defined by SEQ ID NO: 7 and/or the sequences characterizing B. longum subsp. infantis TPY 12-1 in Bunesova V et al. 2016 (Bunesova, V., Lacroix, C., Schwab, C. 2016. Fucosyllactose and L-fucose utilization of infant Bifidobacterium longum and Bifidobacterium kashiwanohense. BMC Microbiol 16, 248).

[0063] In a further embodiment, the invention relates to the use of the composition of the invention, the co-culture of the invention or the cultivated bacteria of the invention in the amelioration of digestive conditions in the human gut. Such use may be non-medical but may generally relate to the improvement of the well-being of the subject using the composition of the invention, the co-culture of the invention or the cultivated bacteria of the invention. The term “subject” as used herein can be any animal having a gastrointestinal tract suitable for hosting bacteria such as a microbiome. In preferred embodiments, the subject is a human. Accordingly, the “digestive condition” as used herein may generally relate to a subjective feeling without necessarily being related to a true medical disorder or disease. As such, the non-medical use of the composition of the invention, the co-culture of the invention or the cultivated bacteria of the invention may improve the subjective feeling of a subject to be affected by a digestive condition.

[0064] In another embodiment, the invention relates to the composition of the invention, the co-culture of the invention, or the cultivated bacteria of the invention for use in medicine.

[0065] In a further embodiment, the invention relates to the composition of the invention, the co-culture of the invention or the cultivated bacteria of the invention for use in treating and/or preventing a digestive disorder.

[0066] As used herein, the term “digestive disorder”, refers to a disorder related to the gastrointestinal tract. The digestive disorder may be lactose intolerance, colic, intestinal discomfort, intestinal pain, visceral sensitivity, and/or intestinal cramp.

[0067] Within the present invention, the composition of the invention, the co-culture of the invention or the cultivated bacteria of the invention may be administered to an infant. Within the present invention, the infant may be a human subject of the age of 0 to 3 years. The term “treating” (and its grammatical variations thereof such as “treat” or “treating”), as used herein, refers to a clinical intervention in an attempt to alter the natural course of the individual being treated, and can be performed either for prophylaxis or during the course of clinical pathology. The term “preventing” refers to, but is not limited to, inhibition or the averting of symptoms associated with a particular disease or disorder. Desirable effects of treatment include, but are not limited to, alleviation of symptoms, diminishing of any direct or indirect pathological consequences of the disorder, or preventing occurrence or recurrence of at least one of the disorders, such as lactose intolerance, colic, intestinal discomfort, intestinal pain, visceral sensitivity, or intestinal cramp. Preferably, the effects of treatment and/or prevention include alleviation of infant colic. Accordingly, the invention is at least in part based on the finding that a bacterial composition comprising P. freudenreichii and B. longum subsp. infantis can treat and/or prevent digestive disorders such as colics of an infant. The combination of the two bacteria species can prevent lactate accumulation and its conversion to H₂ by lactate-utilizing H₂-producing bacteria, which can be health beneficial by treating and/or preventing bloating, intestinal discomfort, and pain.

[0068] In a particular embodiment, the invention relates to the composition, co-culture or the cultivated bacteria, wherein the composition, co-culture or the cultivated bacteria is formulated for oral administration or anal administration. The term “oral administration”, as defined herein, refers to the intake of the composition, co-culture or the cultivated bacteria of the invention through the mouth. In order to ensure a suitable amount of viable bacteria in the gut of the subject, the composition, co-culture or the cultivated bacteria is formulated to allow for survival of a sufficient number of bacteria after passing through the upper gastrointestinal tract, in particular the stomach. In this regard, it was surprisingly found by the inventors that the composition, co-culture or the cultivated bacteria of the invention allows for enhanced survival of the bacteria in conditions resembling the infant gut based on a synergistic effect of the bacterial species of the composition, co-culture or the cultivated bacteria of the invention.

[0069] The composition, co-culture or the cultivated bacteria of the invention may be formulated as a liquid solution, suspension or powder for medical or non-medical use. For example, the composition, co-culture or the cultivated bacteria may be formulated as dietary product for medical or non-medical use. The composition, co-culture or the cultivated bacteria may also be formulated as comprising freeze-dried bacteria. One particular form is a suppository for anal administration.

[0070] The general methods and techniques described herein may be performed according to conventional methods well known in the art and as described in various general and more specific references that are cited and discussed throughout the present specification unless otherwise indicated. See, e.g., Rinttilä et al. 2004,Herve et al. 2007, Furet et al. 2009, Mozzetti et al. 2012, Doo et al. 2017, Pham et al. 2019, or Rocha Martin et al. 2019.

[0071] While aspects of the invention are illustrated and described in detail in the drawings and foregoing description, such illustration and description are to be considered illustrative or exemplary and not restrictive. It will be understood that changes and modifications may be made by those of ordinary skill within the scope and spirit of the following claims. In particular, the present invention covers further embodiments with any combination of features from different embodiments described above and below. The invention also covers all further features shown in the figures individually, although they may not have been described in the previous or following description. Also, single alternatives of the embodiments described in the figures and the description and single alternatives of features thereof can be disclaimed from the subject matter of the other aspect of the invention.

### BRIEF DESCRIPTION OF DRAWINGS

[0072] FIG. 1: Hypothetical scheme of the mechanism of H₂ production in Infant Colic (IC). H₂-producing bacteria convert carbohydrates and lactate into H₂ gas leading to bloating and associated pain.

[0073] FIG. 1A/B: Growth and metabolism of single-and co-cultures of Bifidobacterium spp. or Lacticaseibacillus rhamnosus LGG® with Propionibacterium freudenreichii in media mimicking infant proximal colon conditions. Strain abundance (A1-E1 and B3-E3) and carbohydrate utilization and metabolite formation (A2-E2 and B4-E4) of single cultures (FIGS. 1-2) of P. freudenreichii JS27 (A), B. longum subsp. infantis TPY 12-1 (B), Bifidobacterium longum subsp. infantis CECT7210 IM1® (C), Bifidobacterium animalis subsp. lactis BB-12® (D) and Lacticaseibacillus rhamnosus LGG® (E) and respective co-cultures with P. freudenreichii JS27 (figures B to E 3-4) during incubation for 3 days at 37° C. in fermentation media supplemented with 60% (v/v) of filter sterilized fermentation effluent collected from an in vitro continuous PolyFermS fermentation model mimicking the proximal colon of a two months old bottle-fed healthy baby. Mean values and standard deviations from experiments done in triplicates are shown.

[0074] FIG. 2: Preference of metabolism of lactate over lactose by P. freudenreichii strains isolated from dairy foods possessing β-galactosidase activity. Mean carbon utilization and metabolite formation by P. freudenreichii strains (difference between duplicates were <3.5 mM for all tested strains) after 24 (black) and 48 h (grey) of incubation in YEL media containing 70 mM of DL-lactate and 25 mM of lactose as carbon sources.

[0075] FIG. 4: Survival to gastric conditions of single cultures of Bifidobacterium spp. and Lacticaseibacillus rhamnosus LGG®, and single and co-cultures of P. freudenreichii JS27. Mean bacterial counts after incubation for 72 h in lactose-based media (T₀: pre-stress bacterial counts) and after 15 min exposure to gastric conditions (T₁: post-stress survival). ns: p>0.05; ***: p<0.001; ****: p<0.0001.

[0076] FIG. 5: Growth at 24 and 48 h, lactate utilisation and propionate and acetate formation of P. freudenreichii strains JS27 and JS DSM 7067 in YEL broth containing 55 mM sodium-DL-lactate, and 20% (YEL 80%) or 40% (YEL 60%) v/v of fermentation effluent.

[0077] FIG. 6: Growth at 24 h and glucose utilisation and acetate, lactate and formate formation of B. longum subsp. infantis TPY 12-1 (A), B. longum subsp. infantis CECT7210 IM1® (B), B. longum subsp. longum 35624® (C), and B. longum W11® (D) in mWCSP culture media supplemented with prebiotics (GOS+FOS) and fermentation effluent. Water was replaced in mWCSP media by fermenter effluent in 20% (mWCSP 80%+GOS+FOS) and 40% v/v (mWCSP 60%+GOS+FOS).

[0078] Furthermore, in the claims the word “comprising” does not exclude other elements or steps, and the indefinite article “a” or “an” does not exclude a plurality. A single unit may fulfill the functions of several features recited in the claims. Any reference signs in the claims should not be construed as limiting the scope. As used herein, “and/or” should be understood to mean either one, or both alternatives.

[0079] The following are examples of methods and compositions of the invention. It is understood that various other embodiments may be practiced, given the general description provided above.

[0080] Aspects of the present invention are additionally described by way of the following illustrative non-limiting examples that provide a better understanding of embodiments of the present invention and of its many advantages. The following examples are included to demonstrate preferred embodiments of the invention. It should be appreciated by those skilled in the art that the techniques disclosed in the examples which follow represent techniques used in the present invention to function well in the practice of the invention, and thus can be considered to constitute preferred modes for its practice. However, those skilled in the art should appreciate, in light of the present disclosure that many changes can be made in the specific embodiments which are disclosed and still obtain a like or similar result without departing from the spirit and scope of the invention. Several documents including patent applications, manufacturer's manuals and scientific publications are cited herein. The disclosure of these documents, while not considered relevant for the patentability of this invention, is herewith incorporated by reference in its entirety. More specifically, all referenced documents are incorporated by reference to the same extent as if each individual document was specifically and individually indicated to be incorporated by reference.

### EXAMPLES

### Example 1

[0081] The bacteria were grown in medium.

[0082] The bacterial strains were obtained from the strain collection of the Laboratory of Food Biotechnology (LFB; ETH-Zurich) and/or isolated from commercial products as indicated in the following table 1.

TABLE 1
Strains

| | | Isolation Source and |
|---|---|---|
| Strain name | Origin | Comments |
| Propionibacterium | cheese | LFB strain ID: BT-1205. |
| freudenreichii JS27 (as | | |
| characterized in MIESCHER, | | |
| Susanne. Antimicrobial and | | |
| autolytic systems of dairy | | |
| propionibacteria. 1999. Diss. | | |
| ETH No. 13486) (comprising | | |
| SEQ ID NO: 7) | | |
| Propionibacterium | cheese | LFB strain ID: BT-2764. |
| freudenreichii JS DSM 7067 | | Ex-HOLDBAC YM-B |
| | | (commercial protective |
| | | culture). |
| Bifidobacterium longum | Isolated from | Commercial product: |
| subsp. longum 35624 ® | resected | Alflorex ® capsules. |
| | human | Precisionbiotics, Cork, |
| | healthy | Ireland. |
| | gastrointestinal | |
| | tissue. | |
| Bifidobacterium longum W11 | intestinal | Commercial product: |
| | microbiota of | Proteflor ® IBS. |
| | a healthy | Sundyota Numandis |
| | man | Probioceuticals Pvt. Ltd. |
| | | Gujarat, India. |
| Bifidobacterium longum | infant feces, | LFB strain ID: BT-4325. |
| subsp. infantis TPY12-1 | 6 months old | |
| (as characterized in Bunesova, | | |
| V., Lacroix, C., Schwab, C. | | |
| 2016. Fucosyllactose and | | |
| L-fucose utilization of | | |
| infant Bifidobacterium longum | | |
| and Bifidobacterium | | |
| kashiwanohense. | | |
| BMC Microbiol 16, 248) | | |
| Bifidobacterium longum | breast-fed | Commercial product: |
| subsp. infantis CECT7210 | infant feces | Blemil Plus Optimum 3. |
| IM1 ® | | Laboratorios ORDESA |
| | | SL. |
| Bifidobacterium animalis | Chr. Hansen's | Commercial product: |
| subsp. lactis BB-12 ® | collection of | OptiBac Bifidobacteria & |
| | dairy cultures | Fibre. |
| Lacticaseibacillus rhamnosus | fecal samples | LFB Strain ID: BT-1001 |
| LGG ® | of a healthy | and commercially |
| | human adult | available |

[0083] P. freudenreichii JS27 (comprising SEQ ID NO: 7) was grown in yeast extract sodium lactate medium (YEL) consisting of:
[0084] 1% (w/v) trypticase soy broth without dextrose (Becton Dickinson AG, Allschwil, Switzerland);
[0085] 1% (w/v) yeast extract (Merck, Darmstadt, Germany);
[0086] 117 mM sodium DL-lactate 50% (Sigma-Aldrich, Buchs, Switzerland).

[0087] Bifidobacterium spp. were grown on modified Wilkens-Chalgren medium (mWCSP) (Oxoid, Thermo Fisher Diagnostics AG, Pratteln, Switzerland) supplemented with:
[0088] 0.5% (w/v) soy peptone (Biolife, Italy);
[0089] 0.1% (v/v) Tween 80 (Sigma-Aldrich);
[0090] 0.05% (w/v) L-cysteine (Sigma-Aldrich).

[0091] Lacticaseibacillus spp. was grown in Man-Rogosa-Sharpe (MRS) broth (BioLife, Switzerland).

[0092] Glycerol stocks stored at −80° C. were re-activated on agar plates and incubated in anaerobic jars (Mitsubishi AnaeroPack, Thermo Fisher Diagnostics AG, Pratteln, Switzerland) containing the AnaeroGen system (Oxoid, Thermo Fisher Diagnostics AG). Bifidobacterium and Lacticaseibacillus were incubated at 37° C. for two (2) days and Propionibacterium for five (5) days.

[0093] Subsequently, a single colony was picked, transferred into conical polypropylene tubes containing 10 mL of sterile broth and Bifidobacterium and Lacticaseibacillus were incubated for 48 h and Propionibacterium for 72 h at 37° C. Strains were sub-cultured twice in liquid media before being used as working cultures.

### Quantification of Bacterial Abundance

[0094] DNA isolation from single-and co-cultures and quantitative PCR analysis (qPCR)

[0095] Genomic DNA was extracted from bacterial pellets using the Fast DNA SPIN kit for soil (MP Biomedicals, Illkirch, France) according to manufacturer's instructions. Reactions were performed using LightCycler 480 Real-Time PCR System (Roche Diagnostics, Rotkreuz, Switzerland), 5 μL of SensiFASTSYBR No-ROX 2X mix, and 500 nM primers (Biolab Scientifics Instruments SA, Chatel-St-Denis, Switzerland) in a total reaction volume of 10 μL. Thermal cycling started with an initial denaturation step at 95° C. for 3 min, followed by 40 cycles of a two-step PCR at 95° C. for 5 s and at 60° C. for 60 s. Ct values were obtained using automatic baseline and threshold settings provided by the LightCycler 480 Software, Version 1.5. Individual samples were analyzed in duplicates.

[0096] To generate standards, PCR amplicons were cloned into the pGEM-T Easy Vector and heterologously expressed in E. coli according to instructions of the supplier (Promega AG, Dübendorf, Switzerland). Standard curves were prepared from ten-fold dilutions of linearized plasmids harboring the target gene of interest. Melting curve analysis was conducted to confirm specificity.

[0097] P. freudenreichii (comprising SEQ ID NO: 7) was quantified using primers as followed (Herve et al. 2007):

q5S Trans Fwd
(5′-ATTCCATCGCCCTGAAGGA-3′; SEQ ID NO. 1);
q5S Trans Rev
(5′-TTGATCTGCGTCTTCTGGCC-3′; SEQ ID NO. 2).

[0098] Bifidobacterium was quantified using primers as follows (Rinttilä et al. 2004):

bif_F
(5′-TCGCGTCYGGTGTGAAAG-3′; SEQ ID NO. 3);
bif_R
(5′-CCACATCCAGCRTCCAC-3′; SEQ ID NO. 4).

[0099] Lacticaseibacillus was quantified using primers as follows (Furet et al., 2009):

F_Lacto 05
(5′-AGCAGTAGGGAATCTTCCA -3′; SEQ ID NO. 5)
R_Lacto 04
(5′-CGCCACTGGTGTTCYTCCATATA-3′; SEQ ID NO. 6)

[0100] The linear detection range was between 3.1 and 9.3 log gene copies for P. freudenreichii, 3.5 and 7.5 log gene copies for bifidobacteria, and 3.9 and 8.9 log gene copies for Lacticaseibacillus, and primer efficiency 98, 104, and 101%, respectively.

### Statistical Analysis

[0101] Statistical comparison was performed using two-way ANOVA followed by Holm-Sidak correction and was performed using Graph Pad Prism 8.2 (GraphPad Software, Inc. La Jolla, CA).

### Example 2

[0102] Single and co-culture growth and metabolism of Bifidobacterium spp. or Lacticaseibacillus rhamnosus LGG® and P. freudenreichii JS27 in media mimicking infant proximal colon conditions

[0103] The investigation of the synergistic behavior of the bacteria was performed in in vitro conditions mimicking the infant gut. Evaluation growth and metabolic cross-feeding was performed of following bacterial strains and co-cultures:
[0104] P. freudenreichii JS27 (comprising SEQ ID NO: 7)
[0105] B. longum subsp. infantis TPY12-1
[0106] B. longum subsp. infantis CECT7210 IM1®
[0107] B. animalis subsp. lactis Bb12
[0108] L. rhamnosus LGG®
[0109] B. longum subsp. infantis TPY12-1 and P. freudenreichii JS27 (comprising SEQ ID NO: 7)
[0110] B. longum subsp. infantis CECT7210 IM1® and P. freudenreichii JS27 (comprising SEQ ID NO: 7)
[0111] B. animalis subsp. lactis BB-12® and P. freudenreichii JS27 (comprising SEQ ID NO: 7)
[0112] L. rhamnosus LGG® and P. freudenreichii JS27 (comprising SEQ ID NO: 7)

[0113] The evaluation was done in triplicates in 2.2 mL 96-deep-well plates (Milian SA, Vernier/Geneve, Switzerland) covered with Breathe-Easy sealing membranes (Sigma-Aldrich) and incubated in anaerobic jars (Mitsubishi AnaeroPack, Thermo Fisher Diagnostics AG) containing the AnaeroGen system (Oxoid, Thermo Fisher Diagnostics AG) for 3 days at 37° C.

[0114] Each well contained 1.6 mL of fresh medium previously designed to mimic the chyme entering the colon of 6-month-old infants (Doo et al. 2017; Pham et al. 2019; Rocha Martin et al. 2019) and containing 60% (v/v) of filter sterilized fermentation effluent. Fermentation effluent was collected from the control reactor of an in vitro continuous fermentation model mimicking the proximal colon of a two months old infant and inoculated with immobilized fecal microbiota from a two months old bottle-fed healthy baby, corresponding to Fermentation 2 described in Pham et al. (2019).

[0115] Concentrations of carbohydrates, SCFA and fermentation metabolites in effluent and supplemented fermentation media with 60% effluent are shown in following Table:

TABLE 2
Carbohydrates, SCFA and fermentation metabolites

| | | | Concentrations | [mM] | | | | | |
|---|---|---|---|---|---|---|---|---|---|
| Sample ID | lactose | glucose | galactose | succinate | lactate | formate | acetate | propionate | butyrate |
| media with | 24.3 | 5.1 | 9.2 | 3.9 | 4.2 | 24.1 | 44.2 | 6.5 | 3.6 |
| 60% effluent | | | | | | | | | |
| Fermentation | BDL | BDL | BDL | 1.2 | 1.9 | 18.3 | 60.8 | 7.4 | 7.2 |
| 2 effluent | | | | | | | | | |
| (Pham et al., | | | | | | | | | |
| 2019) | | | | | | | | | |

BDL: below detection limit (detection limit <5 mM)
isobutyrate, isovalerate and valerate <5 mM (not shown)

[0116] For single culture experiments, wells were inoculated with 16 μL (1% v/v) of each working culture or each tested culture. For both experiments, 400 μL of samples were collected before incubation and after 24 and 72 h of incubation. Subsequently, samples were centrifuged, and supernatants and cell masses were stored at −20° C. for future analysis.

[0117] Preference of metabolism of lactate or lactose by P. freudenreichii strains isolated from dairy foods possessing β-galactosidase activity

[0118] P. freudenreichii strains were incubated at 37° C. for 48 h in conical shaped polypropylene tubes containing 900 μL of YEL broth, and two carbon sources 70 mM of DL-lactate and 25 mM of lactose.

[0119] From the above P. freudenreichii working culture, 100 μL (10% v/v on final volume) were used for inoculation. Subsequently, samples of 400 μL were taken after 24 and 48 h for the determination of the concentrations of lactate, sugars, SCFA, and intermediate metabolites in the supernatants by high-pressure liquid chromatography analysis with refractive index detection (HPLC-RI; Experiment 2b).

[0120] Lactate and carbohydrate utilization and metabolite formation were assessed in duplicates. Difference between duplicates was <3.5 mM for all tested strains.

### High-Pressure Liquid Chromatography Analysis with Refractive Index Detection (HPLC-RI)

[0121] Concentrations of lactose, glucose, galactose, acetate, propionate, butyrate, formate, lactate, succinate, isobutyrate, isovalerate, and valerate were determined in the supernatant.

[0122] For the analysis, 400 μL of the supernatants were filtered through a 0.45 μm membrane (Millipore AG, Zug, Switzerland), transferred into glass HPLC vials (Infochroma, Hitachi LaChrome, Merck, Dietikon, Switzerland), and sealed with crimp-caps.

[0123] The HPLC (Hitachi LaChrome) system was equipped with a refractive index (RI) detector and the used column consisted of two parts (stationary phase):
[0124] Security Guard Cartridges Carbo-H column (4×3 mm; Phenomenex Inc., Torrance, CA, USA);
[0125] Rezex ROA-Organic Acid H+ column (8%, 300× 7.8 mm; Phenomenex).

[0126] The mobile phase consisted of a 10 mM H₂SO₄ (Fluka, Buchs, Switzerland) solvent. The elution was performed at a flow rate of 0.4 mL/min at 25° C. Detection limit was of 5 mM.

### Results

[0127] The simultaneous cultivation of propionibacteria and bifidobacteria strains promoted growth of B. longum subsp. infantis in in vitro (fermentation medium) conditions mimicking the infant gut. FIG. 2 A1-2 exhibits the growth of P. freudenreichii JS27 in infant colon conditions and the resulting metabolization of lactate and lactose into propionate, acetate, and CO₂. This would prevent H₂-production by removing substrates and thus feeding both metabolic pathways by which it is produced. P. freudenreichii will compete for the same substrate with lactose-utilizing H₂-producing bacteria (Enterobacteriaceae and Clostridium) and lactate-utilizing H₂-producing bacteria (Veillonella and E. halli) present in the infant colon.

[0128] Various propionibacteria strains (JS9, DF28, SM220, JS62, JS27, MS29, JS7, MS32, JS3, SM206, JS23 or JS26) were analyzed upon their metabolite concentration in order to identify the preference of lactose or lactate (FIG. 3). It was observed that lactate is the preferred carbon source over lactose for the P. freudenreichii strains with β-galactosidase activity (FIG. 3). However, to efficiently remove lactose and generate a more efficient competition with fast lactose-degrading bacteria such as Enterobacteriaceae and Clostridium, lactose-consuming bifidobacteria were co-cultured with propionibacteria.

[0129] Individually grown B. animalis subsp. lactis BB-12® bacteria converted lactose into acetate, lactate and formate and bacterial abundance was increased with or without the presence of P. freudenreichii JS27 (FIG. 2 C1-4, E1-4).

[0130] The drawback of the solely supplementation of B. animalis subsp. lactis BB-12® in milk-fed infants, could be the accumulation and thus high production of lactate. This bacterial property can cause neurotoxicity and cardiac arrhythmia. Moreover, this high abundance of lactate can be consumed by lactate-utilizing H₂-producing bacteria (Veillonella and _{E. hallii}) and produce H₂, which accumulation can lead to bloating, intestinal discomfort, and pain. Lactate accumulation was also observed when Lacticaseibacillus rhamnosus LGG® single culture was grown in infant colon conditions (FIG. 2 F1-2).

[0131] B. longum subsp. infantis of the strains TPY12-1 and CECT7210 IM1® were not growing as single cultures (FIG. 2 B1-2, D1-2), whereas co-cultivation with P. freudenreichii JS27 (comprising SEQ ID NO: 7) in infant colon conditions lead to growth of all strains (FIG. 2 B3-4, D3-4). Synergistic behavior of the two co-cultures, wherein Bifidobacterium was cultivated in presence of Propionibacterium, resulted in no accumulation of lactate. Thus, the combination of the two bacteria genera can prevent lactate accumulation and its conversion to H₂ by lactate-utilizing H₂-producing bacteria, which can be health beneficial by treating and/or preventing bloating, intestinal discomfort, and pain.

[0132] Strains from B. longum subsp. infantis were the preferred strains in co-culture with P. freudenreichii JS27 (comprising SEQ ID NO: 7), since this composition ensures that the formation of lactate by the Bifidobacterium will occur only in presence of the propionibacteria, which on the other side can utilize lactate produced by bifidobacterial and thus prevent its accumulation. The outcome of these findings is, that the growth of B. longum subsp. infantis strains is promoted and thus show a synergistic behavior in in vitro conditions mimicking the infant gut when P. freundenreichii strain is present while the dependency of bifidobacterial on growth factors produced by propionibacteria enable a balanced growth of the co-culture.

### Example 3

### Introduction

[0133] In order to produce a suitable formulation in lactose-based media, a novel combination of bacterial species in presence of propionibacteria was established.

[0134] Single and co-culture growth of Bifidobacterium spp. or Lacticaseibacillus rhamnosus LGG® and P. freudenreichii JS27 in lactose-based media

[0135] Growth interactions between P. freudenreichii JS27 (comprising SEQ ID NO: 7) and Bifidobacterium or Lacticaseibacillus LGG® in lactose-based media were evaluated in two biological replicates:
[0136] P. freudenreichii JS27 (comprising SEQ ID NO: 7) and Bifidobacterium
[0137] P. freudenreichii JS27 (comprising SEQ ID NO: 7) and Lacticaseibacillus rhamnosus LGG®.

[0138] The biological replicates were grown as pure cultures or in co-culture with P. freudenreichii JS27 (comprising SEQ ID NO: 7) in lactose-based media composed of:
[0139] lactose 6.4 g/L (Sigma-Aldrich, Buchs, Switzerland);
[0140] whey protein 10 g/L (Emmi, Dagmersellen, Switzerland);
[0141] yeast extract 5 g/L (Merck, Darmstadt, Germany);
[0142] L-cysteine HCl 0.5 g/L (Sigma-Aldrich);
[0143] KH₂PO₄ 3 g/L (Sigma-Aldrich);
[0144] NaHCO₃ 9 g/L (Sigma-Aldrich).

[0145] Strains were inoculated at 1% v/v (simultaneous inoculation for co-cultures at 1% of each strain) and cultures were incubated for 72 h at 37° C. Viable propionibacteria, bifidobacteria and Lacticaseibacillus were counted after incubation period (T₀: pre-stress bacterial counts) on following agar plates:
[0146] Propionibacteria on YEL;
[0147] Bifidobacteria on mWCSP;
[0148] Lacticaseibacillus on MRS.

[0149] Plates were incubated in anaerobic jars (Mitsubishi AnaeroPack, Thermo Fisher Diagnostics AG) containing the AnaeroGen system (Oxoid, Thermo Fisher Diagnostics AG) at 37° C.: bifidobacteria and Lacticaseibacillus for 48 h, and propionibacteria for 5 days.

### Exposure of Single and Co-Cultures to Gastric Stress Conditions

[0150] After single or co-culture fermentation in lactose-based media, 20 μL of cell suspensions were exposed in triplicate to gastric stress conditions in 96-well microtiter plates (Bioswisstec AG, Schaffhausen, Switzerland) and incubated 15 min at 37° C. in anaerobic jars (Mitsubishi AnaeroPack, Thermo Fisher Diagnostics AG) containing the AnaeroGen system (Oxoid, Thermo Fisher Diagnostics AG).

[0151] Effect of simulated gastric juices was tested by adding 20 μL of cell suspension to 180 μL of filter sterilized 0.1 M HCl solution composed of (Mozzetti et al. 2013):
[0152] 0.5% (w/v) NaCl;
[0153] 0.4% (w/v) pepsin (541 U/mg) from porcine gastric mucosa (Sigma-Aldrich) (gastric juice pH 3).

[0154] Subsequently, cells were stress exposed for 15 min and the mixtures were 10-fold serially diluted in cPBS. Viable bacteria were counted on agar plates as previously described (T₁: post-stress survival).

### Results

[0155] The cells suspensions obtained by pure cultures of P. freudenreichii and in absence of bifidobacteria do not resist gastric stress conditions as described in the method. After exposure to those conditions no viable cells were recovered by plate counting (FIG. 4). The same effect of no cell recovery was observed for the co-cultures of Propionibacterium and B. animalis subsp. lactis BB-12®. Nevertheless, simultaneous cultivation of Propionibacterium and B. longum subsp. infantis TPY12-1 or CECT7210 IM1® and exposure to gastric conditions leads to a higher survival of viable cells of P. freudenreichii JS27 (FIG. 4).

### Example 4

[0156] Growth and metabolism of Propionibacterium freudenreichii strains in culture media containing fermentation effluent:

[0157] Strains stored in glycerol stocks at −80° C. were reactivated on YEL agar plates and incubated in anaerobic jars containing the AnaeroGen system at 37° C. After 5 days of incubation, a single colony was picked, transferred into conical polypropylene tubes containing 10 mL of sterile YEL broth and incubated for 72 h at 37° C. Strains were cultured twice in liquid media before using as working cultures.

[0158] To investigate ability to grow and metabolic activity in presence of filter sterilized fermentation effluent from an in vitro continuous fermentation model mimicking the proximal colon of a two months old infant and inoculated with immobilized fecal microbiota from a two months old bottle-fed healthy baby, corresponding to Fermentation 1 described in Pham et al. (2019), 20 μL of each working culture were used to inoculate wells in 96-well microtiter plates, each well containing 180 μL of YEL broth containing 55 mM sodium-DL-lactate, and different proportions of fermentation effluent. Water was replaced in YEL media by fermenter effluent by 20% (YEL 80%) and 40% (YEL 60%).

[0159] Cultures were incubated for 48 h at 37° C. in anaerobic jars containing the AnaeroGen system. Cell growth was assessed in triplicates for each strain by measuring culture optical density at 600 nm (OD600) at 24 and 48 h. Concentrations of substrate, SCFA and intermediate metabolites in pooled supernatant from cultures from same strains and in same media were determined by high-pressure liquid chromatography analysis with refractive index detection (HPLC-RI) after 48 h.

[0160] P. freudenreichii JS27 (comprising SEQ ID NO: 7) was selected, before identifying the unexpected synergistic behavior with B. longum subsp. infantis TPY12-1 from a collection of P. freudenreichii strains because it showed faster utilization of lactate and lactose at 24 h (FIG. 3) and higher cell growth in medium supplemented with effluent mimicking the infant colon milieu compared to other strains (FIG. 5). The previous characteristics do not apply to all the P. freudenreichii strains and represent specific properties of P. freudenreichii JS27 to maintain viability and activity in the infant gut.

[0161] As shown in FIG. 5, P. freudenreichii JS27 growth was much higher (>two-fold) and metabolite production was increased in culture media containing fermentation effluent (20 and 40%) compared to P. freudenreichii JS DSM 7067.

### Example 5

### Growth and Metabolism of Bifidobacterium Longum in Culture Media Containing Fermentation Effluent

[0162] Bifidobacterium longum strains (detailed in Example 1/Table 1) were grown on mWCSP. Glycerol stocks stored at −80° C. were re-activated on liquid media incubated for 48 h at 37° C. and sub-cultured in liquid media before being used as working cultures.

[0163] The evaluation of growth of different B. longum strains in presence of prebiotics and filter sterilized fermentation effluent from an in vitro continuous fermentation model mimicking the proximal colon of a two months old infant and inoculated with immobilized fecal microbiota from a two months old bottle-fed healthy baby, corresponding to Fermentation 1 described in Pham et al. (2019), was done in triplicates in 2.2 mL 96-deep-well plates (Milian SA, Vernier/Geneve, Switzerland) covered with Breathe-Easy sealing membranes (Sigma-Aldrich) and incubated in anaerobic jars (Mitsubishi AnaeroPack, Thermo Fisher Diagnostics AG) containing the AnaeroGen system (Oxoid, Thermo Fisher Diagnostics AG) for 24 h at 37° C. Each well contained 1.6 mL of fresh mWCSP medium containing 1.03% galacto-oligosaccharides Vivinal® GOS (Friesland Campina, Netherlands) and 0.08% fructo-oligosaccharides Fibrulose F97 (FOS; COSUCRA, Warcoing, Belgium) with different proportions of fermentation effluent. Water was replaced in media by fermenter effluent in 20% (mWCSP 80%+GOS+FOS) and 40% (mWCSP 60%+GOS+FOS). Wells were inoculated with 16 μL (1% v/v) of each working culture. Cell growth was assessed in triplicates for each strain by measuring culture optical density at 600 nm (OD₆₀₀) at inoculation and at 24 h. Concentrations of substrate, SCFA and intermediate metabolites in supernatant from one sample per strain and per media condition were determined by high-pressure liquid chromatography analysis with refractive index detection (HPLC-RI) after 24 h.

[0164] B. longum subsp. infantis TPY12-1 was selected, apart from the unexpected synergistic behavior with P. freudenreichii JS27 from a collection of B. longum strains because cell growth and metabolism after 24 h in medium supplemented with 20 or 40% effluent mimicking the infant colon milieu were highest compared to other B. longum strains (FIG. 6). The previous characteristics do not apply to all B. longum strains and represent specific properties of B. longum subsp. infantis TPY12-1 to maintain viability and activity in the infant gut.

### Example 6

[0165] Screening of QPS Propionibacterium strains able to grow at 37° C.

[0166] P. freudenreichii JS27 and P. freudenreichii JS DSM 7067 stored in glycerol stocks at −80° C. were reactivated on YEL agar plates and incubated for 5 days in anaerobic jars containing the AnaeroGen system at 30° C. and 37° C. Growth on agar plates incubated at different temperature was visually evaluated.

TABLE 3

| Strain | Growth at 30° C. | Growth at 37° C. |
|---|---|---|
| P. freudenreichii JS27 | +++ | ++ |
| P. freudenreichii JS DSM 7067 | +++ | + |

### REFERENCES

[0167] Barr R.G., St James-Roberts I., Keefe M.R., editors. 2001. New evidence on unexplained early infant crying: its origins, nature and management. J Pediatr Gastroenterol Nutr 149-164.
[0168] Doo E., Chassard C., Schwab C., Lacroix C. 2017. Effect of dietary nucleosides and yeast extracts on composition and metabolic activity of infant gut microbiota in polyferms colonic fermentation models. FEMS Microbiol Ecol 2017:1-14.
[0169] FAO/WHO Joint Working Group Report on Drafting Guidelines for the Evaluation of Probiotics in Food. London, Ontario, Canada, April 30 and May 1, 2002
[0170] Fischbach M. A. And Sonnenburg J. L. 2011. Eating for two: how metabolism establishes interspecies interactions in the gut. Cell Host Microbiome 10:336-47.
[0171] Furet, Jean-Pierre et al. 2009. Comparative assessment of human and farm animal faecal microbiota using Real-Time quantitative PCR. FEMS Microbiol Ecol 68:351-62.
[0172] Gupta S. K. 2002. Is colic a gastrointestinal disorder? Curr Opin Pediatr 14:588-92.

[0173] Hervé C., Fondrevez M., Cheron A., et al. 2007. Transcarboxylase mRNA: a marker which evidences P. freudenreichii survival and metabolic activity during its transit in the human gut. Int J Food Microbiol 113:303-14.
[0174] Hyman, Paul E. Et al. 2006. Childhood Functional Gastrointestinal Disorders: Neonate/Toddler. Gastroenterology 130:1519-26.
[0175] Lehtonen L., Korvenranta H., Eerola E. 1994. Intestinal microflora in colicky and noncolicky infants: bacterial cultures and gas-liquid chromatography. J Pediatr Gastroenterol Nutr 3:310-314.
[0176] Macfarlane G.T. and Gibson G.R. 1997. Carbohydrate fermentation, energy transduction and gas metabolism in the human large intestine. In: Mackie, R.I., White, B.A. (Eds.) Gastrointestinal Microbiology, Chapman & Hall Microbiology Series. Springer, Boston, MA.
[0177] Mckay L. F., Holbrook W. P., Eastwood M A., 1982. Methane and hydrogen production by human intestinal anaerobic bacteria. Acta Pathol Microbiol Immunol Scand B 3, 257-260.
[0178] Meile, L.; Le Blay, G.; Thierry A. 2008. Safety assessment of dairy microorganisms: Propionibacterium and Bifidobacterium. International Journal of Food Microbiology 126:316-320.
[0179] Mozzetti, V.; Grattepanche, F.; Berger, B.; Rezzonico, E.; Arigoni, F.; Lacroix, C. 2013. Fast screening of Bifidobacterium longum sublethal stress conditions in a novel two-stage continuous culture strategy. Beneficial Microbes 4; 167-178.
[0180] Pham VT, Chassard C, Rifa E, Braegger C, Geirnaert A, Rocha Martin VN, Lacroix C. 2019. Lactate metabolism is strongly modulated by fecal inoculum, pH, and retention time in PolyFermS continuous colonic fermentation models mimicking young infant proximal colon. mSystems 4: e00264-18.
[0181] Pham V. T., Lacroix C., Braegger C. P. And Chassard C. 2017. Lactate-Utilizing Community Is Associated with Gut Microbiota Dysbiosis in Colicky Infants. Sci Rep 7:1-13.
[0182] Rinttilä, T. et al. 2004. Development of an extensive set of 16S rDNA-targeted primers for quantification of pathogenic and indigenous bacteria in faecal samples by Real-Time PCR. J Appl Microbiol 97:1166-77.
[0183] Rocha Martin, V. N., Schwab C., Krych L. Et al. 2019. Cutibacterium avidum is phylogenetically diverse with a subpopulation being adapted to the infant gut.” FEMS Microbiol Ecol 95: fiy215.
[0184] Savino F., Cordisco L., Tarasco V., et al. 2009. Molecular identification of coliform bacteria from colicky breastfed infants. Acta Paediatr 98:1582-88.
[0185] Savino F., Quarteri A., De Marco. Et al. 2017. Comparison of formula-fed infants with and without colic revealed significant differences in total bacteria, Enterobacteriaceae and faecal ammonia. Acta Paediatr 4:573-578.
[0186] Suzuki, A., Mikako I. Hamaguchi T. Et al. 2018. Quantification of hydrogen production by intestinal bacteria that are specifically dysregulated in Parkinson's disease. Plos One 12, e0208313.
[0187] Talvik I., Alexander R. C., Talvik T. 2008. Shaken baby syndrome and a baby's cry. Acta Pediatr 97:782-785.
[0188] de Weerth C., Fuentes S., Puylaert P. And de Vos W. M. 2013. Intestinal microbiota of infants with colic: development and specific signatures. Pediatrics 131: e55 [symbol]
[0189] Zeevenhooven J, Koppen I. J. N, Benninga M. A. 2017. The New Rome IV Criteria for Functional Gastrointestinal Disorders in Infants and Toddlers. Pediatr Gastroenterol Hepatol Nutr 20:1-13.
[0190] Zeevenhooven J., Browne P. D., L'Hoir M. P., et al. 2018. Infant colic: mechanisms and management. Nat Rev Gastroenterol Hepatol 15:479-96.

1.-21. (canceled)

22. A bacterial composition comprising viable bacteria of the strain P. freudenreichii JS27 and of the species Bifidobacterium longum subsp. infantis wherein the bacteria of the strain P. freudenreichii JS27 is a bacterium comprising a 16S rDNA sequence as defined by SEQ ID NO: 7 or a sequence having at least 95% sequence identity to SEQ ID NO: 7, wherein the P. freudenreichii JS27 maintains being capable of growing in a colon and wherein post-stress survival is improved by co-culture of the bacterium of the species Bifidobacterium longum subsp. infantis.

23. The composition of claim 22, wherein the bacteria of the strain P. freudenreichii JS27 is a bacterium comprising a sequence as defined by SEQ ID NO: 7.

24. The composition of claim 22, wherein the bacteria of the species B. longum subsp. infantis are of the strain B. longum subsp. infantis TPY12-1.

25. A co-culture of viable bacteria of the strain P. freudenreichii JS27 and of the species Bifidobacterium longum subsp. infantis wherein the bacteria of the strain P. freudenreichii JS27 is a bacterium comprising a sequence as defined by SEQ ID NO: 7 or a sequence having at least 95% sequence identity to SEQ ID NO: 7, wherein the P. freudenreichii JS27 maintains being capable of growing in a colon and wherein post-stress survival is improved by co-culture of the bacterium of the species Bifidobacterium longum subsp. infantis.

26. The co-culture of claim 25, wherein the bacteria of the strain P. freudenreichii JS27 is a bacterium comprising a sequence as defined by SEQ ID NO: 7.

27. The co-culture of claim 26, wherein the bacteria of the species B. longum subsp. infantis are of the strain B. longum subsp. infantis TPY12-1.

28. A method of co-cultivating bacteria of the strain P. freudenreichii JS27 and of the species B. longum subsp. infantis, the method comprising the steps of:
(a) providing a cultivation medium;
(b) inoculating the medium of (a) with bacteria of the strain P. freudenreichii JS27 and of the species B. longum subsp. infantis, preferably of the strain B. longum subsp. infantis TPY12-1;
(c) cultivating the inoculated medium of (b).

29. A method for delivering bacteria of the strain P. freudenreichii JS27 and of the species B. longum subsp. infantis to the gut of a subject, the method comprising administering the composition of claim 22 to said subject.

30. The method of claim 29, comprising oral intake of the composition.

31. The method of claim 29, wherein the subject is an infant.

32. The method of claim 31, wherein the infant is 0 to 3 years of age.

33. A method for ameliorating digestive conditions in the human gut, the method comprising the step of administering the composition of claim 22 to a subject.

34. The method of claim 33, wherein the subject is an infant.

35. The use of claim 34, wherein the infant is of the age of 0 to 3 years

36. A method for treating and/or preventing a digestive disorder in a subject in need thereof, the method comprising the step of administering the composition of claim 22 to said subject.

37. The method of claim 36, wherein the digestive disorder is lactose intolerance, colic, intestinal discomfort, intestinal pain, visceral sensitivity or intestinal cramp.

38. The method of claim 36, wherein the composition is administered orally.

39. The method of claim 36, wherein the subject is an infant.

40. The method of claim 39, wherein the infant is of the age of 0 to 3 years.

41. A food product comprising the composition of claim 22.

The application's sequence listing, which the Patent Office published only in electronic form, follows.

SEQUENCE LISTING (14 sequences)

SEQ ID NO: 1 - DNA, 19 bp, synthetic construct
  source 1..19: mol_type = other DNA
attccatcgccctgaagga

SEQ ID NO: 2 - DNA, 20 bp, synthetic construct
  source 1..20: mol_type = other DNA
ttgatctgcgtcttctggcc

SEQ ID NO: 3 - DNA, 18 bp, synthetic construct
  source 1..18: mol_type = other DNA
tcgcgtcyggtgtgaaag

SEQ ID NO: 4 - DNA, 17 bp, synthetic construct
  source 1..17: mol_type = other DNA
ccacatccagcrtccac

SEQ ID NO: 5 - DNA, 19 bp, synthetic construct
  source 1..19: mol_type = other DNA
agcagtagggaatcttcca

SEQ ID NO: 6 - DNA, 23 bp, synthetic construct
  source 1..23: mol_type = other DNA
cgccactggtgttcytccatata

SEQ ID NO: 7 - DNA, 2656772 bp, Propionibacterium freudenreichii (residues 1-1,328,386 of 2,656,772)
  source 1..2656772: mol_type = genomic DNA
tgcacaagggagcttgactgtgagacagacatgtcgagcagggacgaaagtcgggactagtgatcttctggtggattgtggaatcgccagaactcaacggataaaaggtaccccggggataacaggctgatctttcccgagcgctcacagcgacggaatggtttggcacctcgatgtcggctcgtcgcatcctggggctggagtcggtcccaagggttgggctgttcgcccattaaagcggcacgcgagctgggttaagaacgtcgtgagacagttcggtccctatccgctgcgcgcgtaggaatcttgagaagggctgtccttagtacgcaaggaccgggacggaccaacctctggtgtgccagttgttccaccaggagcatggctggttggctacgttggggagtgataaccgctgaaagcatctaagtgggaagcacgcttcaagatgagggttcctgcacagttaatgtggtaaggcccccggtagaccaccgggtgataggtcggatgtggaagcatggtgacatgtggagctgaccgatactaagtggccgagggcttgtcccacactttaattcttgtagattgttgtgaagagttttgttcgcgtccactgtgtcgttcccggtatacggtcgggaacctcctgttcatgccgccctgttggggttggtgtgggggggttgtacacgtagtaagccgatagttgtttcggtggccatagcgagagggaaacacccggtcccattccgaacccggaagttaagcctttctacgccgatggtactgcaggcgggagcctgtgggagactaggaagccgccggactttcaactccctcccacccgatggtgggagggagttactacattcagcacctcttcagcgtgcaatcaatgcggtgccgtcaacacggtgcaagcgttgcgtccactgtttgttttcccgggacacctcatacgaggtcttgtcccgggttttttgcgtcctgggagcgttcacgtgccccggaccctcctgcggggttcgcctaccgagcgagcatggccatgcggatagccttgccccatggcattggaagacgagcatccccgcagcttcgtgaccgttcctgcggagcagcgacccattcggcaccgcaccgccagtcgcgtcctggtgattgccgacgacaaggtcctcctcgaggaggacagcgatcccggtaagccgggtgtcgtctggtgggtcaccccgggtggtggcgtcgggcccggcgagacctatgaacaggcggccgtgcgcgaactccaggaggagacgggccttgtgatcaccgagaaggacctcgaggggcccattggtgatcgcaccgtgcgccatggttactcggatcaggtgctgatccagcacgagcagttctatatcgtgcggaccgagcccttccggacaagcttcagtggctacacggaggaggagaagatcaccctccaggccacgcggtggttcacgcgagaggaactggcgacggtcacggtgtggccgaagcagctcgtgcagctgtggaagtaccggccgggcatctactttgacatgggcgttgtcgaggagtcgaccgttcccctcaccgacgcgcagcggtcccagtagccccgaggtccacacgccgggccgaggcgggtacacctgccgggcaggccgggggttccggctctgggaatggagctgttcggttatccaccatgtggacgacacgcaggcaccatgctcgtcttcgagcggaatcacgggccccgataactgtgtgatttgtgcgtgaaggccgattcgggggccgtttgagcggcgcgccgcacggataacagcgttctatgccaccgataacaccaatagtccccaagtgcttgacaggactcttcgaagcctctttgaagatggctctgactagggaaaacagtcctcagtagtcaccgcgaaggagcagtggctctgttactgttctagcggctggacgggtagttcgattgatggctcatcccaatcgggggtgtaggagttggggtctgaagccgccggtctcgagcaggcttcgggcgatgtagttggtcaggttgcggaacccccgcgccgagccgcgcaggtgctcgagcctgccgttgatcgcctcggtcggcccgttgctggtgccgggtcgttcgaagtaggcgagcacgtcagcggctcgcttcttcagggtccggcccagggtggtgagctcggtgagcaccttggggacgccggcgctgaggtcggtgatcagcttctccatgagctcgcggccacgttgccggtcctcgtggcgataggcggcgatcatgcgctggtagacaccccaggtcgcctcgacctcgacgtgagcgtcatcaacgaacagcgcgcgtagcctgtcgctctgcttgtcggtgagcaggtccgcgccggtgtgcagcgtgcgccgcgacttgtagagcgggtcgtccctgaacccacggtgcccgtggatcgcgagttggacccggcgccggcacctgtcgagggcgtcaccggccaggcgcacgacgtggaagggatccatcaccgtgaccgcgtccgggatctcctctgcagcggcggtcttgaacccggtgaagccgtccatcgcgaccacctcgaccgcgtcacggaaggcgtcgtcgcggtcggcgagccaggtcttgaacgccgccttcgaccggccctcgaccatgtccagcagccttgctgggccggcgccatcgcggaccggggtgaggtcgatgatcacggtgacgtacttgtcgccacgcctggtgtggcgccagacgtgctcatcgacgccaatgaccttcacgccctcaaaccgcgtggggtcgttgatcagcagccgcttgccttcagccaggaccgcgttgttggcggtgtcccacgcgaccccgagtccctcggcgacacgggcgacggtgaggtgtgcgaccacgatcccttccagcgcccaccgcagcccggtgcgcgagagcttcgcgcgtggctccgccgcggcgctggtgtcttggcgccacacgtgtccgcagtcggcacagcggtagcggcgcactacaacttccagcacggtcggtcgccagcccagcggctcgtgggccaaccgccggatcacggtgtcacgagcagcgccttcgctgccgcaccgtcggcaccactgatctggttccaccacgcggcacgcgaggaccgcacgatccggttcaagtcgttgtccggtcacgctcagaccgaggccgtcgagtcgagcgaaggcggtcaggtcagggcggccgaagccggccggcggggtagcgtcggacacgtcgaggtctttcggatggatggcgtaggaacctccatcgtcgggagacctcgacgtctatctgcggaccgacgcgcccggccgacctacaccctcatctgagaagaccccacaaacctgtctagagcgtgggggatcaggaaagctctcatccaggctgtgtctttctgggagtactggaagaccaccgcgctcgaccctgcggcagatgccgttgtcgaaagcacctatgtgtatctcgaagcgctagaagcctgggaggcgaaccccattggagtagcacctaccccaccagtagttatgagccaagacagcagcacgggtttcgctcagatcttctccgccaccgcgatctgggcccacaactgggctctgggccaaggattgatttctgggtcgacgtgggatgcgtccgattggcacaccgtgtgggcggtgtggcaggacctgcacggagacgacgactacaatctttccgccgttccacaagtactgatggcgggtgccgccgatgtcgggatcactggatctccacgtcttgactacacctccgcgcagatcacatcgatcctcgcccgatacaatggaaccggtagtgctgccgctgattatgggctcttcacgattgagggtgtagttggggtctgaatcctccggcctcgaggagactgcgggcaatgtagttcgtcaggtttcggaagcccaaggctgagccgcgcaggtgttccagtcggccattgagggcttctgtcgggccgttggaggtgtgggggcgctcgaagtaggccaggacgtctgtggcgcgccgcttgagggtgcgccccagggtgatgatctcagcgagggcggcgggaacgccgcggctgatgacctcgatgacgtgggccagctgggctcgcccggccttggggtcgggatcgcggtaggcggccacgatcttctggtagatgccccaggtggcttccaccccgacgtgagcgtcctgggcgaagacgccctccaggcgggtgcgttgcttgtctgtgaggagatccatcccggtgtgcagggtcttgcgcaccccgtacagggggtccccggaccggcctcgatgtccggtggtgtcttgctggacgcgctggcggcagtggtccagggcatcgccggcgagctggacgacgtggaagggatccatgacctccaccgcgtcggggagttcttccttcgctgcggtcttgaacccggtgaagccgtccatggcgaccacctcaatccggtcgcgccacgcagggtcttgctggctgagccactccttgaaggccttcttggagcggccctccaccatgtccaacaacctggcaggaccccttccctcgcgcagcggggtgaggtcgatgatcacggtgacgaacttgtcgcccctgcgcgtgtgccgccacacgtgctcgtccaccccgatcgtggtcacaccctcgaagcgatgctcatcgttgatgaggaccctgcgtccctcctccaggacggaggtgttggcgcagtcccaggacacgcccagaccctcagcgacccgggcgacggtgaggtgttggacgacgatgccttccagggcccaacgcagtccgccccgggacagtttcgagcgcggctgggccgccccagtggtgtcctgcctccacacacgcccacaccccgaacagcggtagcgacgcactcgcaccaccagtgtcaccggtctccagcccgagggctcgtgggcgaggcgacggaccacggtgtcgcgggggatcccttcgcacccacactcgcgacaccaccggtcatcgtccaccacccggcaggccacctcgcagcgatccgggaggactctctggcccaccaccacgaggccgaggtcatccaggcgggcgaacgtggtcagatcgggggcagcaaaggtagcgtgggacacgtcggggtctttcagatgggcagcgtaggaactcccatcatcggaagaccccgaccctcacacccaccccgacacgccagccagactcaaccccccgctacaccccggatcgcgaagagcctgattatggccaggaggttcgcggcgtctacaacgtgttcgaacagtacaacgcggcactcaggggatgaatcaatgaccgatgtcccgctcgtcgcctcaaggcgagactaacgttgtgccggtgaacgaccaagctgtgagttcgcagccgactgttttccgacgcgtcatgttcggcgtcgcgatcctcttgtgtgatctgctcagcgcggcattgtcctactggccgcttgtgatgatcggactcgtcctcatgcaggtcaaggccaacgtcatcggtccagcggagcacattgtcggtgccggcgaggacagcttggccttcatggttttctacgtcgtcagcgcaatcgtggtgctgatgttggccgtgcttccggcagtgatcggcaacctggccctgcgccgccgggcgggctggccaccacgtgtctgcgtcgcggtcgccgccgccgtgatcctcgcaccggccgtcgctgcggtagtggccccgctgaccatgaacgagatctggtacagagcaacacactggtggtagacaaccggcccaggttccctacgagtcggccgatgccgaagatcgcttcggcaggagcccccacacccttctatagcgggcatgaatccgcgtgttcccgcgattcaggcttcacgaatcgtgaacttacggggctcttcgcagttgagggtgtagcccgggaccgccggctggttcgcggataggcgtcgaggtcttccaggatggaagttctcacgctcaccatccgccggaagacctcgacttgcaccaccctacgttcgtgacccctgacctgaccacgttctgccgtctcgacgagctcggccttcaagccgtcgggcagctgctcgaggctgatcgggcggtgctggagtgccgcgtcgtcgaggacgacccgtggtgtcggaagtgcggcgcggagggcgtgccgcgtgacacggtgacgcggccgctggcgcatgagccgttcgggcatcggccgacgacgctgctggtccgggtgcgccgctaccggtgcacgcactgccgccggacctggcggcaggacacgtcgaaggcggcggcgcccagggagaagatctcccgcggcgggatcgggtgggcactcacggcgatcgtggtcgaccacctcaccgtctcccgcgccgcagcagggctcggggtgtcgtggcataccgcgaacaccgcgatcatcgccgaaggcaagcgtcgcctgatcgacgacccggcgaggttcgacggggtcaccacgatcggtgtcgatgagcacgtctggcgtcacacacggtttggcgagaagtacgtgaccgtgatcatcgacctcacccccgcgaggaacaagacgggcccggccaggctgctggacatggtcgagggccgctcgaagcaggtgttcaaggagtggctcgccgcccggcctgcggagtggtcgagccggatcgaggtggtcgcgatggacgggttctccgggttcaagaccgccgcggccgaagagctccccgacgcggtcccggtgatggacccgttccacgtcgtccgcctggccggcgacgcgctcgaccggacccggcagcgcgtccagcaagacacactcgggcaccgcggtcacgccggcgacccgctctacggggtccgccgcaccctccacaccggcgcgagcttcctcaccaagaaacagaccgcgcggctcgacgcggtgttcgccgccgaggagcacgtcgaggtcgaagcgacctggggcatctaccagcgcatcgtcgccgcctaccgcgaacccgacaagaacaaggcgaaggagatgatgcgggcggtgatcgactctgtcagcaacggcgtccccgcgctgctcaaagagatccgtcgcctcggccgcacgctgaagcagcgcgccgcggacatcctcgcgttcttcgaccgccccggaacgagcaacggcccaacggaggccatcaacggccggctcgagcaccttcgcggttccgccctcggcttccggaacctcacgcactacgtcgccagatcgctcctcgaagccggcggattcagaccgctcctacactctcattcgcgatgagcccgattgatgatgctcttgcctcggcatagtgcgtcgccaatcctagggaacccatcgaaggccatgaattttcccagaggacatgggtgttcgaacatcccggcagagctcttgaaggtcggccgtgcacccttgtccaggcttgaaaggaaacaagttgtctgttcgtaggattgcggtggccacaggtgctgcggccgccatgtttgtgacgacgtttgcgggcatggcgcctgcgaatgccaaggaggtggcgtccactcacgaggggtactgcacctcagctgatgcgcccggctccaagtcagtggtggttgacttcacctccgtcgacaaggccaagggcatccagaccaagtgcgcagtgaacctgtccggtaaggatgacgtcactcgcgatgtcagccagctgttgacggatgcgggtttctcggccgacacaacggccttcccggccacgacggtccagggcctgcccgccaaggcagtggacggcgagggctggttggccttcaccggtgagcccggtaccaaggagtggagccagctgaaggctgcacctgcttcggtgactgcctccgtgctcggcctggtctatggcgacaacaccggtagcgggccggccaagggacctgccgttgacctgtcgacgtggaagaccgccgcccctgtggtggtcgccggatccctggacaagagcgtccccaggggttcgaccgccgttggcctcgacttctccgtgacggctcagtcgagtgcaacgtcgactgaccagccgaccaaggttgagtacaagctcgacaatggcgacgaagagggcacttggaccgcagtgccgaaggctggcgtgtgggacggaaccagtgcttggacctacaagtggagccaggcgaatgccgcttcgggcatctacacggcgacctaccgcgtcaccaatgccgacggcctggtgaccaccagcaagcccaccgagcaggccgttgttgctggcccggtggcgattgcccagcagcctactgatgtgacggctgcccccggcggcaatgccgtgttcaccgtgaagaccacgggaaccggtgtggatggcgccgcggttgcttaccagtggcagtcccaggacaaggtgaccggcgagtgggccgacgtcaccggtgccacgaagtcgagctacaccgtgcgtcaggtgaccgaggaccaggacggcacgctctaccgcgtggtcgtcaccggtgccgattcccagggcaaggaagcctccttgtactccagctcggcgaagttgactgttgctgaggtgccggttgcgaccgcgaccttcgtggacgtccccaagggcaacgagttcttcaaggagatcgagtggctcgccggcgagggtatttcgactggttgggtgctgcctgatggcaccaaggagtaccgtccgctggattcgatccaccgtgatgcgatggcagcgttcatgtaccgtctggccggtagcccggcctacacggcacctgctacctcgccgttctccgatgtggcgacctccaaccagttctacaaggagagctcctggctggcctcgaccggtatcaccaccggttacggtgacggaaccttccgtcccctggacaacgtgaaccgcgatgccatggctgccttcatgtaccgcttcaagggcaacccggcctacaccgctccggcgacctcgccgttcaacgatgtggccaccagccagcagttctacaaggaaatggcctggctgtccgatgagggcatctccactggttgggaagacggcacctaccgtcccgtgaccccggtcgcgcgcgacgccatggctgccttcatctaccgcctgcagggcaactgaacaactgaaaactgaaggcacttcgtgagcgaggagtcttcggcctgaacaacacggtaggcccggaacacatgttccgggcctaccgtgttgtttgcccaccgggtttgtgtctgctcgcgtctcttcgccgcccgtgtcgtggggccagcgcggcgcgcgtggggcggccgggggagttgtggtccgcagtcactggatgtcgagttttgcgccacgtcgaggaaaatcaacatatgttgcattgtcgcggtgttatccacaatcgccgcgcataatcacgtcctgtgattgcgctgtgttaacctgcccacgaccggaggctgtgatcagcgcccaggtgccgcgcggaagcgcagtgctgggcgagggattgccaagggtcacttgatttcaccgggtcgtggtccacacacagacggctgaaacagccccccgctggttcgcgtgcttggtatccactcaggaagggaaacaagttgtccgttcgcagaatcacggtggccacggccgccgcagccaccctggtgatcagctcactgggcgtcacggcgtcggcaggcgccgacacggtcaagggccatgacggcccctgcaccacctacgagctgtccaacggggccgtcccggtggccttcgaccagcaggatgggtcagggcgcgctgcaggtgctctaccgtgccgggttcaatccgtcatccaccgggggcactgacgcgcccacgagcatcaacgggttcccccacggcgcgcagaccggatacacatggctgcactacaccggcatcgccggggccaactggacgcagtcagacatcagcaactccacccatgccccggtggagggctggtcatatgtgaagaccggcgagcagaaggcgccgggcatcgggcccaccttctccgacgtcaccccaccggccgtcaccgatgtcacggtggccgatgtcaaggcgggctccaccagcaccactgcgagcttcaagaccgacgacccacaatcgcgcggcatctggaagctcgacgacaacggtgcctggttcgacctgcccttcatcagcggaccggacaatctgcgcacctggacgatcaaggacctgacgcccggcgtccacacgctctacatccgcatctgggacctggccaacaacaacaccaacacctgggagagccacgatggcacccagttcaaggtgttcggtgccccgacgatcacccagcagcccttctcaccgaccacctcggtgggccaggacgccagcttcaccgccaaggcgaccggctaccccgatcccacctaccagtggcagcgtatggatggccagggccactgggtcaatgttgatggtggagaccaggcgaccctgaccgtcaccaacgccacgatggcgatggaccagggcaagtaccgggtgcaggcgaccaatgactatggcaccgctgattccgacgtggtgacgctgtacgtgtgggcacatccccagagtcagtacttcgtcgacgttcccggcgacaacatgtactacacgcagatcaactggatgggcacctccggctatgccaccggctggcaggtcgccgggggacacgaataccgtcccctggaatcgatccaccgcgacgccttggccgcgttcatgtaccggctggcgggcagccccgactacacggcacccaccacgtcaccgttcagcgacatggcgcccagcgatgagtactacaaggagatctgctggctccagtcgaaggggatcgccaccggctatgacgatggcaccttccgtccgctcgacgacgtgaatcgcgacgcgatggccgccttcctctaccggttcaacgccagccccgacttcacggcgcccacgacctcgccgttccgtgacgtgaccacgggccagcagttctacaaggagatggcctggctgtctgacaaggggatctccaccggctggcccgacggcacctaccgtccggtcaccccggtggcacgcgacgcgatggccgcgttcatctaccgcatgaagaactgaaccacgatcccgatgacggtgtggcggtggcaggaggattgccaccgccacaccgtcatcccatgggttgttgtgtcccgtgcgttgtcgtgctcagtgagttgtcaaattcggtggcgtgacatgcacaatcccgcaacaaatcgacccgatgggtcggcggggatccgcaccgaattcgagtgagcgcctgtattcctgtcagagggctgtgttagcctcaaatcggctggattgcagagcatcgccatgagcccggtggtcaccaccgatggcggccagcagacccggccggacgtttcgtatccacacggggctcgaatcaccatgcgaaccctgtcgtttcgcaacagtttcgcaaaatttgtgtttttgcaccccacatgagaggaaacacatgctcactcgcaagagagtggttgcagcgggagctgccgccaccctgtccctcacggcgtttgccgggttgcagcccgccagcgccgccaccggcccccatggcggtgcctgcaccgatgctgagtccgcaaacagcatcactgtcgtggtcgacaaccatgacggcaccccgatccagcagaggtgcgcggtggatgtcggcacggtgaactcgagcaagctgctccccgcggcgggctacacgcagaacgagtggcggccgctggaagccggccccacgacgatcaatgactatcccaagagctccgatttgttcaagggttggcgctacttcacggttgacggtgccagtggcgcgtggaagctcgtggatacccgagtcgggctgggtttcatcgacgtgacgccgggccagaccgtggctttctcgtacacgaatggctacttcaaccaggccggcccctcgaagaccgccaatgagctgaaccccggaccagtgctgtccaacctgaaggtggccgtggccggagccagtgccacagcgtccttcgtcgctgatgacgcaaccgacactgcgcagtggcagcttgatggggccaaggaatggaatgacggacccgagatcaaggacgacaagactgctagctggtcgctgggtgagggcctgactgctggcaaccacacggtgaccgtgaagctgaccaacaaggccggcaagagcgcccagttcagccagtccttcaccattcaggccgcggccgaactgatcacagcccagccgcagcctgttacggcagcacctggcaccgatgccaccttcaccgtgaagaccatcgacggcggtgccggcctgaccttccagtggcagaagcaggatgcagagggcaagtggcagaacgttgaaggtgccacgagcgccacgctggtggtccccaaggtgaccgccgagtaggacggctcgaagtaccaggtggtcgtgaccgacaagaacaagggtcaggagacctcgaagactgcgattctgaccgtcgccgaggcggcagagctgatcactgcacagccgaagtcggtgacggtgcaggagggctcacctgccagcttcaccgtgaccgctgcgggtgacaacctcacctaccagtggcaggccaagggcaacgacggcacgtggcaggatgttgccggtgccacgaaggccaccctgtctgtgagccaggccaccaaggaactgaacggttcccagtaccaggtggtcgtgaagagcggcgacaagtccgagacatcctcggtggtcacgctcacagtgaccgacaaggccgtgacgcagttctttgcggatgtgccgttgaacaaccagttcttcactgagatcaattggatggggacgtctggttattcgactggttgggtgcaggctgatggttcgcgtttgtacatgccgttggatggtatccatcgtgatgcgtttgcggcgttcatgtaccggatctcgggtgataccggctatcaggctcctgcggtgtcgccgttccgggatatcactccttcgacgatgtattacaaggagatgtgctggttgagttcgaagggcattgcgacgggttggcctgatggcacctatcgtccgttggacaatgtgaatcgtgatgcgatggctgcgttcatgtaccggtacaacgggagtccggcctatcaggctcccggttcttcgccgttctctgatgtggtgacgagtcagttgttctacaaggagatggcctggatgcagtcgcagggtctgtcgacgggttggcctgatggcacctatcgtccggtgaccgcgattgcgcgtgatgcgatggccgcgttcttgtatcgcatggagaaccccacgaagtaacacccacaccgctgggcaaccacccagcgcgacaggaaaccagcatggcaagaaggtggtggccgggaagtcctcccggtcaccaccttcgtctgttcgggccccgcaggagcaggtcatgcccccgtgcggcgtcatcgggcgtcgtgcggccaacccgcctcagcgggcggcgtcggtgcccacctcggcgccatcgatgatgcggtacgaatagccctgctcggccaggaaccgctgccggtgctgggcgaaatcggcgtccaccgtgtcgcgggccacaaccgaatagaaatgcgccgtattatcgccatcggcgtcatggccgctcagtcgctgcttggggcgcaacaggcggccgaggcgctgtgcctcttcctggcgcgacccgaatgtcccggagatctcaatggccacctgtgccacgggaaggtccaccgagaaattggcgaccttgctcaccaccaggaggtcgaggtctcccgaacggaaatcagcgaagatcttctcgcgctgccgattcggcgtcgatccggtgatgatggggcagtcgagttcacgggccacttcctccagctgatcgacatattggccgatcaccagcgtgggagttccccgatatgccttgaccagcgacgagatcaccggcatcttcgacgccgcggtggacgcgaagcgatgccgctcggtcggttcggacattgcataggccatcttctcgtcctcgctgaggtccacgcgcacctcgacgcagtccgccggggcgatccagccctgctcctccatctgcttccaggcggcgtcatagcgcttgggcccgatcaggctgaacacatcggcctcgtggccgtcttcgcgcaccagcgttgcggtgaggccgaggcggcgtcgagcctgcaggtccgcggtcatccggaacaccggtgccggcaacaggtgcacctcgtcatagatcaccaggccccagtcacgggcgctgaacagctccaggtgggggtgtacgccatcgcgcttggtggtgatcacctgataggtggcgatcgtcaccggacggatctgcttcttggcgcccgagtattcgccgatctcatcgggggtcagcgtggtgcgggccaacaactcgtcgcgccactggcgggccgccaccgtgttggtcaccaggatcagcgtggtggcatgggccttcgccatcgccgccgcaccgacgatcgtcttgcccgagccgcacggcagcacgacgacgcccgagccgccctcccagaacgactcggccgccaattcctgatagggccgcaactgccagtcgtccaggtcaaggtcgatctggtgcgcctcgccatcgacatagccggccacgtcctcggccggccagcccagcttcagcagcacctgcttgaggtgcccccgctcggagggatggatgagcacggtggcgtcatcgaccgcctcgccgagcagtcccttggtcttggcgctgcgtcgcacctgggtcatcacggcggcgtcggtggaggtgagcaccaggccatgggccgggtccttgtcgatgcgcaggatgccgtagcgttccatcgtctcggcaatgtccatcaacagcccggagggcaccgggtaacgcgaatagctcagcagggcgtgcaccacctgctcggcatcgtggccggcagcacgggcattccacaggcccaggggcgtgagccggtaggtgtggacgtgttcgggggcgcgctcgagctcggcgaagggcgcgatcgccgcgcggcattcgtcggcctgcgggtggtcgacctcgagcaggagggtgcggtcggattggacaatcaggggtccgtcgtgagtcatcgcccaccagtatccccgccgtggccaaatgtcagcgccgggcccgccccgggctgacaccgggcggcagactcacgtgtccgacggggctttccccgcatcggagggggcgtcggcggacgccggaatgtcgactgcgatgatgcgcgtcacgggcaggctgagccgtccggcggcgcggcgcaccaggttgaccaccccggatcccatggacaggacgcgcatcgtgtgggaatgcgtggcgccgttgtcgtcggcccagtcgacccccacccacaggtcgtcgcggtaggcccgggtgagggcctgcacgatctgctcgggcgacaggccggtggattcgcgtcgcagcagggccgcggcgagcgcatcggcgtccaccggtggtggggcgaccggacgggccggtgccggggcgcgcctcgacgggggagtggtgatctgcacgccctggctgctctgcgcgacgggcgccaggccacgttgacgcaggaacgccaccagctcggccggttcggcggcagcgccgagcacgcccggtgccagggcgatgaggcccaggtcctcggcccgtggatcagcgagcagggaggcctcggtggcgggatcgtccaactgcaccacggcgcccagggtcatcagccgcaccttgccgtgttggcgtgccacgtcgtcgagcaatgaggtgagcggggcgggcagcccggcgtcggcacccgattcattgtgggtcgtgagccattcggagatgtcctgtacgctccacccggcgtccagcgccctctcgagcgaggcaggcgtgaagcggtaggtcgcagccgcgccatgggactcccggttggccatgacgccgatcagcgccgccgtgtcatggtcgagcggcgcaggggccaccgccgtgagatcggattgcagcacgaagcggtcgccgtaggcggtgaatcccggatcgggcgtgctccgggtggcatcgagcaggccggtggtgcgaccgaaggccatcaggcccagccattcggcctcgcggaccagttggcgggcgacgccgggccaatcgactcccaaccacgccggatggcgccacgacaatctctcggccagcgagtcggcgacaacggcagtaccgcgggtggcggcgacgagctcgtcccacgctgcctcacgcaatgccgccgaggtgggcaggcccggatgggtgggtgcgtcgccatgggcccccggctccggctggccggtgggccgctggccggcagcccgttgactggcggcccgggagctggccgacgagcccgtcatctcctctgccggtgcgcgcccggcggcgtcgaggtccgcgggccaccatgtcagggagcgccaggcgtcacgcaccagcagccaccgtgcgaaggcgtcgaggtcgaggaagtcgtccaggccggtcgtgggcatcagcaggccgccgcgggtggtgaacagtcccgcgccgcgcgtgattccgatgacgaactcggccaaccgggcatcgtcgaccaagcgggtgaaggtgcccatctcgcgcttcggtacgccgccggtggccagcgcccgtggggtgcgggcggcaatgtcgtcgagcaccgccaccacgtggctggtgagctcctgggccgagccgatggcggcccggtcgaccaggcttgccggcagggaagccccggtggccgaggtgggggcctgccaggcgggcacctgcgtgggcacgggttggcgcaccagccggccgccgcgcagccgcagcgccacctcacggggcagcaacacctgatcggggccgatcggatgcaacagcccccacgccaggaggagatccatggtggattcggccgattcccgagtgacggcccggtcggcgcgctgcacggtgcccgtcggcggcccccagaccagccgatcgagcacggcgcgccccgcctcgccgaccgcccggagggcctcgtcgatcgtggccggagcaagcggggtgggggataccgccgcgagcccgcccgggtgctcgccgaaggccgcgcgcgcggcctgggtcaggtgcacggggctgccccacgccagacccagttgtcgcagcccatcaagggcccggtccacggcggcgacatcgtccggcaggcccattgctgcggccagctgcttgtcgtccaccggatcgccgccaccctcccaggcggcaaccgcctgcgccaccagcaagtgccaggcgtcgaggcggtcaagggcccgcagggtggacgcgcgggccgaaaggcgttcgatcaactcggacaggtcgagcgggcggggctgcgtcagatcgggccgggcacgcaacaggacagccaactgttgggcgtcgaaggccctgatcgcgtcggcaagcgaacgcgacgaggcgctcaccgggaggctccccccgacggggcgtccggatgatggaggccgcgccagacgcagaacaatgtggcgggaatcatcgccaggcagacccagcgggccagccccagcgtgatgtcaaagggggagaagacctgctgcgaaatcgccaggaagaaattgaagccgagcagcccgaaccccgccaggaagcagaactgcagccacttgcggcccacctggatgctcatcgcgcagatccacgccacgaacaggcaggtcagcgacagcgctccgacgaacaggccgagtgcaagggcgctcaccatgaggacgccccccgaaccgagggccttcgacatggtggtcggctggggcgggcggggtgccgaaccctgtggtcccggatagggcgctcccggataaggggcccccggatagggggcgccggcggggccctgcggatggttgggcgcgtggtaggggctcggctggccgccctggaatcccggcggcgggaactggccgggcctgaactggccctgtggggcctgcgcctgacccgggcggccggtgggctgcgccccggcggtgccgcccgcgacatgggacgagtcgaaacgtgccgccgggttcggcggcggggcatcatgtggtgcggcgaccatcgttgagggatcgggtgggttgttggcgccacccggcgccagagccgcatcaagtcggatcggccgatggggatcgtcgtggcccgtactggtggggaacagggaatcgccggccgcgaagggcgtggtcgggtcgcgcggggcctcggtggcgggttccacggcgtccagggcggggccggggtcggcgggttcctccaccgtggcgggcggtgcgatcgccgcggcaacttccacccggggtgtcgggctgccggcatccaagggtgcggccaccggcgcggcgaagccgtcgggcacggcagcgggcgcgtcctcggtggtgagagtggtcatcacgcgcgtccgggaggtcatggcccaagtgtatgagtcggtgcccatccgtccggggatggtcgtcccggtcgactaggacgatcttgcgggcgccggtaggcttggaagacggccccggcgccggtcgtccgggcaggtcaggtcgtccggaaggctccgggggaactcccggtcaccgatgaagtggtcagggccacgcggatcgtcaacagcggttcagaacgatatacgtcggatcgcccagcgatccccgagcagtgtgagggtgcagatgccaagcggcagggtgcgtttcttcgaccccgataagggtttcggattcatcaccaaggacgagggcgatggagaggtctatttccgcgccaatgtgctgcccgacggggtgacctccgtcaagcggggtcagcgggttgagttcggcatcgtcgatggccggcgcggtgagcaggcgctgtcggttgagctgatcgatccgccgccgtcgctgtcaaaggccacccgtcgcaagccggaggacctggcggcgatgatggaggatttgatcaagatgctcgacgggttgtcgaacggctaccgtcgtcgccggtaccccagctcgggtcaggcctcaaagatcgccgccatgctgcgcggcgtcgccgatgaattggagaagtgatctatggccacggtgaaagcggctctcaaaccggacacggtgttgtcagcggcaatcgaggttgcccagacagccgctgaacaccaggccggtgacttcggcgtgggtgagcatctcggcttccggatggagggcgaccgggtgctcacgcacttcttcgcctgcccgcatccgggctatgtgggttggcactgggccgtcacgctgacgcgtccgccgcgcgcccgcaccgccaccgtcgacgaggtggtgttactgcccggcgagggtgcactacccaccccgcaatgggttccgtggtcgcagcgcgtgcgccccggcgatgtgacgccgggttcactgctgcccacgcccgacaatgatccccgcctcgagccgggattcaccggcggcgagatggctgccgatgatgatccggctgaatggtcggagacccgtgccatcgtcgcggacctcggcctgggccgtgagcgcgtgctgtcgcacgagggacgcagcgaggccgcgcagcgctggatcgagggtgcggcgggtcccgacaatccctcaaccgaacatgcgccggcctattgcctcacctgcggctacttccagcggctgtccggatcgctgggggtggagttcggggtgtgcaccaactccttcgccccgcgcgacggcaaggtcgtcagcgtcgaccacggctgcggtggacactccgatgtggtggccgacgagcgtggcatcgaactgcccgagccggtgtacgacacgatcagcatcgagcagtcgctgttcgactgattcatgccggggcggatgacccgccccagtggctgtcccaagggccgtgcggatcattccgcgcggcccttgtgctgctacggcagcttcttggcggccgcatccgaggcggtggtgcgggtctggcccatgcgccggcgtcgcaggatgccgtagctgatggccagcaccccgatcaccgcgccgctcactgccacccagaaccaccagcccaggccggcgtcgcccagcggtacccgccagaaatatgccgcaatcgccaacacgatgaacaccaccgtgccgatggtgaaggcgatgagcccgtcctcgcgcaggggagcgacgggtgcctgcacgaagaagcgctccttgtcggagatctcggcgtccgacgtgtgggatccggtgccattcgctggattcgatgctggggccatgagcacatgctagagcacctgtgaaacgcctatagggtgtcgcccatggtctcgcaatcccctggggaaacccctgtggcaagcgccgacgacagcgcaaaattgtcgtccttcaaccggtggttctccatcacggcccgcggctcatccgcctcacgcgaagtgcgcggcgggttggtcaccttcttcacgatggcgtacatcctggccctcaacccgctgatcatcggcaccgccgttgattcacgcggtgagctcgtcagcggggcgccgaagtacctggatgccgcacaccaggtggtggaccaggcggcggtgggccattccatcgcgatggtggccgctgccacggccctcgttgcgggcctgatgacgatcctgatgggcatcgtcggacgcttcccgatcggcctggccgccggactcgggctcaacgccatgatcgcctatgtgatcgcccccaccaccacatggccgcgtgccatggggatgatcgccgtggagggcatcatcatcacggccctggtgctgacgggcttccgcgaggcggtttttcgggcggtgcccaaggaattgcgcgtggcgatctcggtgggcatcggcctgttcgtcaccttcgtgggcctggtcgacgcccatgtgatcacgcccggttccgggacgccggtacagctgggcctcaacggctcgctgagcacctggccggtgctgatcttcgtgatcggcctgctcgtgctgctgttcctgtacgtgcgcaagaagcgcggctcgatgctcatcgccatcatcgccaccaccgtgctcgccatgatcgtgcaggccgtcgtcaaggtgccggccacgttgtcggacggcaccaccaacccggcgggatgggcgctcaatgtgcccagctggcccggactggcggcgttcaagcttcccgacctgggcctgctcggccgggtggacatcatcggtgccttcgccaacggtgagggccacttcaccgcggccagcatcctcaccaccgtgatgctggtgttctccctgctgctggccgacttcttcgacaccgtcggcaccgtggtggccgtgggctcggaggggcagctgctcaactccgagggcgagccgccgcgactgcgcgagatcctgctggtcgactcgatcgccgcactcgccggtggcctggcgtccacctcgtcgaacacctcgtatatcgagtccaccgcaggcgttgcggagggcgcccgcaccggctttgcctcggtggtcaccggcctggcgttcctgttggccgtgttcctgtcgcccctgaccaatatggtgccggccgaggccgtggccccggtgctggtcctggtcggcttcctcatgatgcagcaggtgtccgagatcaattggaaccacctggtggacgcgattcccgcgttcttcaccatcgtgttcatgcccttcgcctattcgatcaccgccggtatcggcgcaggcttcgtgatcttcgtgctgctgaaggtgttccagggcaaggcccgtcacgtgcatgcgttgatgtgggtggtgagcgcgctgttcgtcatctacttcggccagggcgtgatcaccaagtggatcgccggcacctgatcggtcccgttcctgatggacgacaccgggctcccgcactggcgggggcccggtgttccatcgtggcgggcgcggcgccatcgcgggtgcgtggcctagagtcatcgacagtggacagcccgtcgcggagtgatgcgacgacggatggtgaggatgatgcgatgacggcgcagagccggcggcccggtcaagcagcgcgtttcggcagggttccgatcgccgtgctggtgaccgccctactgctcgtcgtcggggtgctggccgccacgccccccacggccggggccactcccggggtcgcctcgaccaccacggccgtgccctcgacgtcatcgccggccacctcgccggccaccgtgggaaccacggcgactgcacggcccctggccaccgccagcgccacggcaggcgccacgtcgtccggcaagggcccgggccgcaccaagacgttcatggcgctcatcgccaccggcgtgctcgcggcgctcgctgcggtcttcgtcttcatccgctcacgacgcgagaacgcccccgagcaggcggaatagcgtcctgccccgctggccggggaatcacccggccggtcgggctcagatgatgcgctccagcacccaatcgatgcaggcgagcagcgccgagacgtcgtcgggatcaaccgaggcgaacatgccgacgcggatctggtcggtgccgagcttgcggtagggctcaatgtcgacgatgccgttggcgcgcagcaccttgcacagctgcggggcgtcgacgcgctcgtcgaagaccacggtgcccaccacattggagcgcagcgcagggtctgccacgaacggacgggcgacctcgtgggcctcgacccagtcgtagaggcgccgggccgaatcggtcgtgcggccggccacgaagtccatgccgccgttgtccatcatccagtccagctggttgcccagcagcaccagggtggcgatggccggggtgttcagggtctggtgcttggcggagttgtcggcagcgagggtcaggttcaacacatcgggcacccagcgtccatcgggagccgcggtgagctcggcggcgcgttccagggcggccggggaacacagggcgagccacagcccaccgtcggagctgaagttcttctgcggtgcgaagtagagggcgtccgcctgccgcacgtcggcggcgagcccgcccgccgcgctggtggcgtcgatcatcaccagggcgtcgtcggcgatgccggcggggcgctgcacgggcatggcaaccccggtggaggtctcgttctgtgcccacgcatacaggtcggcatgctcgtcggtggcggggaaggccccggagccgtagttggcctcgacgatcgtcggcttgtcgagccacggggtgcgtgacacggccgcggcgcacttgcggctgaactcgccgtagaccccgtgcgagctgtggcgtcgcaccaggctgacgcaggccaggtcccagaacagcgaggccccgccgtcgccgagcaccacgcggtagtcgtcgggcagggagtagagcgcggccagttgctcctggatgtgggcgaccaacgacttcaccggcggcttgcggtgggaggtgcccatcagcggactctgcgccagggcggccattgcctcgggtcgaaccttggcggggccggatccgaagcgtccgtcgcgggggagcaggtcggtggggatacgcagatcagtcacctgcggattgtttcactgtcagcggagcggctgcagcacggtccagtgggccggtgtggcacggttgggggacccgccggtatggcccgccccgagcgcggcttggtgcggcggggaataattggtgtaaccggggtgctcataggttctgtgggcgggaggacggagagcgcgcaatgagtgaactcatcgacaccacgcagatgtatctgcgcaccatttatgagcttctggagtcaggggttgagccgcgtcgggcgcggatcgtggagcgtctgcaccaggccggcccgacggtctcccagaccgtggcacgcatggaacgtgacggcctgttgggcctgagtcacggtcgcaccatcgagctgtccgacaccggctacaacgagggacgcgccgtcatgcgccgtcaccggttggctgagtgtttcatcgtcaatgggctgggcatggactatgcctcggcccacgacgaggcctgtcgctgggaacacgtgatgagcgaggaagtggccaaccggttgtgcgagatgctgggcacgcccgtctcgaccccctatggcacgccgatcccgcatcccgatgcaccggaggcctcctcgctggaggactacggcgtcgacctgctcgaggccgagcagaagggcctgggcaaggcacgcttcgtgctcatcgatgagtacgcacaaagtgacatggacttcctcgaggcggtcgatgccgccgggatccatcccggtgccaccgttgacctgtcgcgcgacggcgaggactatgtcgtggcgagcgagggcggaaaagccctgcacgtgcccgagaagtacgccccgtcgctgcgtgtgagcgccctttagtcagcgctgagccgaaggggagtcccggatcacggggaatacttcgaccccaccgcggcgttccctaattgtcgcccggtgcattgcgcgggcacccggactttgaaaggacattatggctaccgttgagttgaccaccgacaacttcgagcagaccgccctgcagaagggcattgtgctcgttgacttctgggccgattggtgtggcccgtgtcagcgtttctcgcccatctttgacgctgccagtgacgccaatgacgacatcacctttggcaaggtcgataccgaggcgcagcagcagctcgccgcatcgctggagatccaggcgatcccgacgctgatggcgttcaaggacggcaagctgatctaccgcaatgccggactgctgaaccggcaggcgcttgatgcgctgatctcgcaggtgcgtgacttcgagcccgccaacgcctgatcccctcagagccgcccaaccggctcccaggactcatacaaagaaccggtcaccacctgcaggtggtgaccggttctttcgtcgtcacgctgtgctgtccagagtcgttctcacgctgtgccagccagagtcgttctcacgactggggatggcggtccagggactggatctcggagatggtgccgagcagcaggtcgacgtcggacttgtacgagtcgaggcgtccggagaacttcgcatcgaatccctcgagtccaccagcagcgaacgcttactcgtactcgtagacgtcgtcgtaggtggcggtgaagcgctcgagcagctcgtgctccttgccgtcaagctggagggccagctggatcacccggaagtcggtataggcgagctcgaactgcaccgcccatgcacgcatgaactcatggcggttggcgatgtgctggtaatggtggtcgaccgtggtcgccacccggcgcagcgaatcctcgacatcaagcatctgtgtctccttgctgatcgcaactccgcgcggttgtcagagttgttggtgtgaacagcacagtagctcaccgattcaaggcgtttccccttgtcgtcgcgcgtattctgtgatcatcaggttgtcagttcatcaaagcgaggctttcccagtgagcatctccacgaccaccgatatcgcctattcttctgacggcgtatcgaagcttgatgtgtaccacgatcccgaccatgccaatggggcggcggtgatcgatatccatggcggcggatggttccgggggagcaaggacaaggacgccgattgggcctcacgcctcgccgccgagggctatctggtggtcgtgccggagtaccacgatgtacccgatggctactacccggcgccgctggaggacatggaccatgtctggcagtggctgcaggccagcgacctgaccttcgatcgtcaccgcatcggggccgtcggctcgtcggccggtgggaacatgagcgtcgagctggcgatcaagtacggcatcccggccgtgtccctgtcggggatcctcgacatcgatgactggctgaccaagcatgccgacgtcgtcccggcccccgacaactcgcagaacttcgccggagcgagctcgggcatcaaccagggcggcgccaacgacgccttctacaagtggttcatcatgaactacttccacgagcgcaccgaccgcctgaccgaggggacgccggtgcaccgcgtctcgccgaagaccggcccggtgtacctggcgaactccctgaacgagttcgtccccaccagcggggtgctgaccttcactgaggcaatggtgcgcaacgatgtgccggttgtggcccagttcctcagcggctcacgtcatgccaagggctacttggatgacgtctacgaccagacagtgcagtttctcaaccactacctattggatgaaggacgatctgaatcatgactcgcgcaacccgtcgcgaccctgtctcggatgaactgctgaccccggagaactcggcgttcgtgttgatcgactaccagcccacgcaggtggactcgatcaactcgatggaccgggcgaagttgatcgacaacatcgccgtgaccacgaagatcattcagacctacaaggtgcccgtggtgctgtccaccgtgaacgtggccaatggacgcaacaaggacaccatcccccagctcaaggagctgctgcccggggtgccctcctacgaccgcaccgcgatcaacgcctgggaggacgccgacttcaagaaggcggtggaggcgaccggccgcaagaagctgatcatcgcggccctgtggaccgaggcctgcctcaccttccccaccctcgacgcgatccgtgagggctacgaggtctatccggtggtggacgccgtgggcggcacctcggtggaggcccttcagacggccctgcgccgcgtggagcaggccggggcacagctgatcagcattgcccagctcgcctgcgagctgcagcgtgactggaaccgcaccgataccgcgggcggattcgtcgaggacctcatcgaggccggcatcttcctgaagttggaatgagacacccgccgggtggcactgcgcacggctgaagcgcgtagccatcgcggcatcgagcggcgtcgcgggacgatcgatcccctgggggtcggcccctgcggcgccgccttgtcatgtccgcaggtcgtgcggacgcatggctcagctcgccgacgggtcggtcagttcagactgcttggccatgaaggcctgctcatccatggcgtccacatgcaccacccggccgtcgtagccaccctgttccagggcgaccagcacggccggcaccgcgcccacgatggcggtcatgacatcgggtgaatagacggtggaggcgatggtgatcgtcttgtggtcaggggagatgctggctgccgtgtgttggcgcgccagccgttcgatgaggtcgaggagctcgttgtcgtcggccaggggcggattcacccggatggccaggttgaggtgccagccgatggccttgtcttctcggttcattgccctgtctccttgctggtgggtcttcctgatggggtggtgactccacagtattcagggcaggtgacaacgccggagtaggccgggcgacgatgctggcggccccgagaggattcgaacctccgacacatggtttaggaaaccactgctctatcccctgagctacggggccagagcacctaggttagccgctgcggtgtggacgctgccagcgctcggctggctgtagcggcagtggacgttgcgtgcaacaagatcacgcgtctttcgggcaatttcacgtcatttaagtgatgacgggcggaaacggggtagaagtttacgtaactatctaaggatttctctcagagatggaccccggggtactacaccagtgaaagatgctctaaaatggtagttgaaggtgacgtttcgccgttgtaggtctcctgggggtgggcagacagcttcggctcctcgacggaacgtcaccttcctatctgtccggggttggtcggtggtgcagcgtggcactcgatctgacgttgggtggcagctcccgtgccaccggcagccgctcgctaggctgaggccatgagcgagcaaggtcttcagcaggcgcgggacaagatggcgtccgccggcgtcggacgcaccgccatcgaggtgttcagcgattactacaagcagctggaaaccggtgccaccggcatcattcccgagagcagcatccggcccatcgaggaccccccgagcctggccgatgtggtggttaccgaccagcaggcccgtgacgccttgtcgaagacggtgttcatcaagctcaacggggggctcggcacgtcgatggggctggcccatgcaaagtccctgctgcaggtgcgcgacggcaagagcttcctcgacatcgtggtgcagcaggtgcgcgccacccgccagcaatggggggtcaagctgccgctgttgctgatggactccttcagcacccatgacgacacgatggcggcccttgccgactatcccgacctggcggtggatggcctgcccctggacttcctgcagagcaaggaacccaagctgcgtgccgacgacctctctccggtcgattggcccgctgaccccgagttggagtggtgcccgccgggccatggtgacatctacgccgcgctgtacgactcgggcctgctgtccacgctgatcgacaagggatatcgctatgcggcggtgtccaactccgacaacctcggggcggcccccgacgcaaggatcgccggttggttcgcgtccaccggcggagactggtgctccgaggtgtgcgtgcgcacggtgaacgacaagaagggcgggcacctggcgatccgcaagtccgacggtcgggtgatccttcgggacacggcccagaccgcacccgaggacatgaagtacttcaccgacgagcatgtgcaccgctacttccacgccaacaacctgtggtgggacctggtggccctcaagcagaagctcgatgagcgacacggggtgatgggcctacccctcatccgcaatgagaagacggtggaccccaccgacccgagcagcccggccgtgatccaggtggagagcgccatgggtgctgcggtggaggtgttcgatgacgcgcgcgtgctgctggtgggtcgtgaccgcttcgtgccggtgaagaagaccaacgagctgctgttgctgcgctccgatgtctactcgatcggtgatgacggccggctgcacgcccgggtcgagcgcattccgggtgttgacctgggtgctgactacaagttcgtcgacgatttcgacgagcgcatccccgccccgctgggaatggtggaggccacgtcgttgaccgtcgagggcgactggcacttcggtaccggcgtgcgcgtgcgcgggacagttgacctgggcccggacggcggcacggtgcccgacggggagctgttgcagggtgactagtcccgccccgtcggatgacccgaccgttgacgactccgctccggatctggcgcagtgcgccagtttcgcgctgaccgggcactatctcggcggtgcacgtcctgaggtgagtgagccgggccagctactgaccgtgctgcgcgaccacggctggaccccgcagcgactggctgcgctgcgcgaccagcgccatcatgacgggcaaagctggcccatggccctgccgatcggcgtgcccgttcccggtgggttcgcacggttccatgcctgggtgtccgaggtggtggtcgcgctcaacctggacagccgcgacgcaggggtgcgcgacgcctcccaaccccttgatgccgagacccgccggctcatggctgatctgccgccgcactacggatcagctggctgatccgtagaggcgagtggggtggatcagctggcagccccgtcgatgccgatgcctcaaccgtcgcttgaacggcgtgcctgcgtccggccctccagggaaggactgttggacgccgcgaggtcgttgacccgctcgatgccctgtgcctcattgcgtgccagcaggtcgcggatctccgtgaggatctcggcctcggtctgggtcttctcggcatcaggatggcgcaattcacgcatcttgttgatcggcaccacgatcgcgaagtagaccactgccgccaggatgaggaatgagatcagcgcagtgaggaaggtgccgacgtgcacccctccgggagcccaactgctgaagttcggggtgccgccgagcttgcccagcaggtcaagcacgatctgggtgaagctggtgaccaccgcgccgaaggcggcgccgatgatgaaggcgacagcggtatcgatgaggctgccgcgcatgatgaagttcttgaagcccttcacattgtcctccatgtcactcgaggggatcggtggaggtcttcacgctacggcaccccctggagggcatcgtcggcgggttcgcgggagcccggtcaatcgctttccaacaccacgctcagcgtgtattcggaggcggcggctgccagctcccgtgcggtgcgggagtctgccgccacgatgaccagcgccccgctcgacgatgagctgtcatccagcgcgcccgaggaacccgggctggggagggccgcgatccgcacccggctggcaatcacccgggtgtcggcgcccgggttggcgcccacgacgctgatctggttgccgacgcccagtacacccgccacgcccttgtcctcaatgcggaacggcaccagggtgagcccgtctgagtcggccaccagccccttgcccacgaaatctgagctggtgagcaccgtgccggccggccggggcacggcgaccacctggccgatcgcagccccggggtcggccagtgtggccgaggtggcgacctcggctggaacctgcagggtggtgacgtcgtcggcgcccacggccacgcctgcggccagcggacgactcgcgatcaccacggtgtgtgaggaggaggccgagggatccagtgcggtgagcacggccaccacgcagatggccgctgcgatgaggccgaggccgcggcgatgccagcggacggcacgaacgagggaattgagccaagcgggaggagtcacacccacaccgtgtgtgcacaccgggtggtcaagcggttatccacagttctgcccgccctccgcagggaaggcgggcagaactgtggaacgggggtgctggtgcggtcaggccaccttggcctgcgtgctggagccggctgcggcgggcgtcgtggacccggacgtcgacgtcgagccactcgtggtggcccctgaggcggtgctgctggcggtcgaggcgtccccggacgtgtgggtggcagactcggaagcttgcgaggaatcggcgccgtgggcggtttcggtgtcgtgcagcgacgagcccggtgccgtcgaggcgcccgaggtgcggttatcggtggcgtagaaccccgatcccttgaagaccacgcccacggggctgaagaccttgcgcaggtggccgttgcagtcggggcagacggtcaacgggtcgtcagagaacttctggaagacctccaggtcgtgtccacaatcggtgcaggtgtattcgtaggtcggcatcgcgtctctcgtcctcatggcctcgcgttgctgcggggccccggcaattctaagtgcgatccacgtaacacccgaatcaggtgcgctattcccgagatggtccggggcggtgcggcgtcggtgggcacgggtcgacaggtggctgccggggtgcgttcacacggccgggcggttgccgttgtcggcggtcacgatcgtgtgatggggggtgatgatcacgcccacggcatggtcgtggggttcctggggcagggtgtcggtgacctcgtcatcgaacaacagcagccacagcagggtgcccgggcgggtgtgtgccagcgcacggtcgtaccagccggcgcccatgcccagccgtgagccgtcgcgtccgccggcaagtcccggcaggatcaccacgctcgcccggctcagcgcaggggctcccagtggctcgccacggggtcgatcgatgcccaggacaccgggggacagctccgagccggtggtgtaccaggcccagtcgatgtcgtcggcggccggtccgccggtcatatagggcaccatcacccggtagccggcctcgaggaaggaatcgaccaggggatgggtgtccggctcatcgggcagcgacaggtagctggcgatcaccgcgtcgttcggaatgcggccacgggccaggtcgagcacgcgcctggtgagttcacgggtggcctcgcggcgctcgtcggcagtgcggtcggcccggcggcggcgcgcgaggcgacgcagctgcgcctttgtgctctggccgcccttggcggggggcgtgctctgcccgcctgcatcgggcgcggtgcgtcccgcggtgttgggcccagacatgcacctatcgtaggcaatatggccctctttggacgcaagcgggcgccggtcgccgccgaaccggagccagaacccgaccccacgttgcccggtgcgcccgcaccgcaggccaatggattgcggtcggtttcggcgcaccgcgacttcctgctgtcgaaggtgcagccgctgatgcccttcggcatgcgcttgctcgacgcctggggactgtcgctgtgcgaggacctcgtggccgacggtgacctgcccccgttgcccgaggccgagagcgacggctatgcggtgattgcgctcgatgtgcgcgacgccgcagtgggcacgcgtgtgcagctgagcgtgcgtggcgatgtgcagaaggtcggctcggcggttcccgtctatgccggtcagcccatgccgcccggcgccgatgcggtgctgccgttggcgcaggtgcgccgcgagggccaggagctctcggtgctggcgccggtggtgaccggggaacacgtccgtcccaccggcatcgatgcagccatgggcgaggtgctgatccatgccggcaagcagctggacgcccgggcgatcggcctgctcgccggcgccggcttcgacaaggtcttctgccgcccgcgcccgcggatcgtcgtgctggccgtgggggagcaattggccgacgacgcgcccgcctccatggcggaacgacgccgcgacgccgcgtcgcacatggtcgcggccgcagccaaggccgatggcgcccaggtgtggcgcgaatccgtggccggcaccacgcccgatgacgtggccgaagtggtctctgaccagctcatccgcgccgatctgatggtgatctgcggcggcacggccggcggacgggacagcctggtggggcgcagcctgaagtccctcgggcagaccgactttgccgaggttgccatggagcccggcggcctgcagggcttcgggatcattggccaagacgaggtgccggtggtcatgctgccggccgatccattggcggcctatgtggccttcgagctgttcgcacaccccttgatccgcaccctgatgggtgcgcgtgacatggcgctgtccagcgtcgactgccggttgacgatggacgtctccggcgaggcgggactgatgcaggtggttgccggtgtgatcacccgcgacgcccaacaatggtcggtgacgcccctggactttgcccagggcagcctcaccaccctggtggatgccgacgccctgatcgtgttgccggccgagctcggcacgatcgccgccggcgccgtggtcacctgctggctgctcgatcgcgactgaaccatggtcgacctggacctgccccgggcacaccgttggcccctgacactgcgcttcggcccgctcgcgctgcgtccgatcgaacggcgggacgcggccgaattgcgtcaactgagagcccggaaccgtgagtggaccggcccctgggacaccacggtgccgccgcagggcgtgccgcggtcgctgaccttcgggcgcatggtggccgaacagcgcgcccggggacgtgctgccacgcagttgtcgtggctgctgaccctggaccccggggcggcaggcggcggggaggcacgtcgcaggaggcgcgccccgatcgtcggccagctgacggttgccgacatcgtctacggggcgggccgtttcgcctcgatcggctactggatcgacgagggccatgcgggccgcggcctggtgccgctggctgcggcgatcgccaccgactactgctttgaggtgctcgagttgcaccgcctggagatctgcatccgtccggagaaccaacgcagcctgcgcgtggtcgacaagctcgggtatcgccgggagggcctgcggccccgttacctgcacattgacggtgactggcgcgaccacctggtgttcgtgatgaccagcgaggaatgcccggccgggggactggtgcgtgcactggtggagcagcgggtgcaggacgccgcgacgaacccggcgaaagcggccggcgatgctgtggattgagcaggcagtttgcgtgcctgcggcgttgcgttgagaggcgcgggcccattgcccataccgttgggctcgtgggaatgactgggcttatctggctggcgatcgtcgccggttggttggcctatctcgtgccgcggttcctgttgcacaaagaggtcagtatctcccccacgttgagcgcggcgcgcgacgccttggccagcccgatgcacctggtgcgccgtggcggacaggatgacttcgcggagcccaccgatccgagcctgcagatctccacgccgctgcagcgcgactcggtgttgttccagacgcgtcgggccgcccagattgcgatgcggcgccgtcgtaccggtttcctgggcagcctgttggtgatggtggccggcgtggtggtctcggtgatcacccccgccccttggtggcttgccctggtgggtgtgggcgtgctggccgtgttcgtggtgctcagccgcatcagcgtgcacaccgtcaacgcaatgatcgccgaccagctggaagccgccgatcaggactgggccgaggacacagtcaccgtctgtgaggtggacctcacccatgtgcatgatgagaacaccgagatctcgattccgctgaacctgccggtggactccacgatcggtgacctgtgggagccgattgcggtcacgccgcccacctacgtgtcgaagccgttggtgccgcgttcggtgcgcaccatcgacctgacgatgacggctgatccgccggcgcaaccgaagatgccggtgaccgccgagcgtcccgaggatgtcgacgacacaactgacatccgggctgcacaggacggtcgccatgatcacggtggcgacgagggcgatctgcccagggcggtcggggagtaggaatcaagtggggtccagccgccgtgaggtgctaggctggttcccgctcaaagagctcgttgggctcgatgatctggggctatggcgcagttggtagcgcgtctcgttcgcaatgagaaggtcgggggttcgaatccccctagctccaccagtgagaagcagatgaaggggtccccgcgtcgtgcggggaccccttcatctgtcacgggcaaggatccggtttgggcccggtatcgacgcacgcatcagcattcatcgcaggagatgggctgctcggcggctggcctcatgcagggtgtccagcgcgttctcgatgagcgggtccacgtggcgtgcccggcggcgcttcacctggcggtacgagatgcccccgccgacccaaccgaacaggcccagtgccccgagcgcgacggacagcacggccagtccggcattcatcgcgaagaccgaaccagccaggaatgccgatcccacgatgccgatggtgacggccacgaccatcgctcgtgaggtcttggacctctcgagcgagatgatcgtcgtgagggccgtgtcggcctcctcctgcagcgcgcgcaccatgtcacgattcttgaggttgcgatccctcttgagctggagtgtcacggtctcggatcgctgggtgcggcccaggggaacggaggcgacggaagtcgtcgcgcggggattttccaccgtccagccgaagccggggtaggtgtcacggaacagcggctcaaaggtgtggggcacgcgcacggtggcgtactcataggccgtgtactcatctgttgcgggcgcattctggacggtcatggggttctccctcgtggtcggttctgctggctcggctgacatgaatcaagcttcgacgccacgccgggtgcgcacatcgtccccgcggacccatcgaagtagtccatgtgcagtacgcgtgatcgctgccatgcggggaggatgggaaccatgacatccacggcacgcccggccattgccacgaccgggcccagatggcgcgcgcttccgcgcgtggcacagatcacggtccaggtcatcctgatggtggcagtgggcgtcgaggtggtcaccgtggcggtcagtcgggcgccggtgatccagtacgtgcccgccgtggcgatgaccgcaggaatcctcctgggacgcttcgggcgctcgtggggctacgtgggattggggctggtggccctggccccgatgatcgcggtcctcgtggaccgtcaggcgaccggcatctggtcgatggcctgccttgccgccttctggttcgtgctgcgcggcctgtccgcatgggtggtcggtgtggtcatcggtgtcgccaatttcgtggcggtggggtgggaggccggcacgatcgacgtgcgctaggtgtacttccccgtgacgttgtgaacgcgggctgagggagtctggccgccgatcccggtgtggggtctgtggtgattgtagtgatggagccaggtctcgtaggctgcggcgcgctcggcttcgctggcgtagggcttcgcgtaggcccactcgacggcgagggttcggttgaaccgctcgaccttgccgttggtctgcggccggtatggccgggtccacttgtgcttcacctcgtcgccgagcgcgtcagcgaaggcgcctgaccggtagcaggaaccgttgtcggtcatcaccgcggtgactgtgacgcccaggcctgcgaagaacgcgttcgcgcgggtccagaaccccgctgcggtctctttgcgctcgtcgtcaaggatctctgagtacgcgatccgggagtggtcgtccacggcgtggtgcagataccggtagccgcgagagccggctgccccggcacgggctgccttgtcgcgggccactcccgcgtgacggtcctgcatggatccgcgaccgtgggcacgccacccgccgccgtcggggatccggccttgtttcttgatatctacgtgcacgagctggcccggcgcggcgacctcgtaccgtttcggcttcgggcggcgaaccggcagcccggtggcctggtcgatgttgatcagcttcggcatcttgtatcgggcgagcacccgaccgaccgtggaacggtgcaaccgcaggtgatacgcgatccggtgcggaccccaccggcgagtgaaccgcaacgcgacgatccgatgctccgtcttacgcgaaagccggttcggtgacgaggtgggcctcgaactacggtcgatcaacggcagccctgcccggtacctgtcggcccaccgcttcaccgtcgcgggcgagcactggaaccgttccgccgcccgccgcaacgaccagccctgttccacgacgagaacagcaagacgacgacgcccttccggtgtcaagggtgcgttagcgtgagtcacgaagacctccgtggtcaggagagtgagtgtggtaacccacatcctgcccggaggtcttcgctacctcacccgttcacaacctcccggggaagtacagctaggacaccagctcgtccgtctcggcgtttgcggcagccgtctgcgcagccatcgcgagcgcgctgcggggaaactaccggtaccgcgtcgaggccgaggcgcggatgagggaggccgagcagggccgtcaggccgccgtcgagcggggagtggcccaggagcggctgcgcatcgcccgggacctccatgacggagtcggccatcagatcgcggtggtcaacatgcacctgggcgccgccgaggttcatctgagcgatccccgggcgctgcgtggtgacctggtcgccgcccgggcggcagtgcaggccgtgttgcgggagacccagcagatcctggccgtccttcgtgtggacaacgcgggggagcgcccgcaggcgacgccgagccccgcggcggtgggcgacctggtggagtcctatcgtcaggcgggcatggtcgtgaatgcgaacatcgggagtttcggtattgcgctgtccggccagtccagtgtggccgtctatcgggtggtgcaggaggcgctgaccaatgcacacaagcatggggtcggcccggtgtcgttggaaatatcccagaatggggagggccttgtgtccatcgaggtggcgaacatgcgtcgcagcacgtcgtcccccggaccgggcggtggaaacgggttgattggaatgcgggagcgagtggaatcggtcggcggtagtttgcggacacgcgcagacgatcgtcttttctggatcgttgccacgattcctgccgacggtcgggaggcacgatgaccacggtgatgctggtggatgaccaggaaatgatccgcaagggattacgggtgatcattgatgcctatcccgggttggacgtggttgccgaggcgggtgatgggttcacggccgtgcggcgcctggacagcgtgcaggtggacgtgattctcatggacctgaatatgcccggaatggacggggtggaagcggtgcgccggatccgcgaggcccgtggacccgaggggccccgcattctggtgctgaccactttcgatcaggacgagaacgtgcttgccgccatgcgcgccggcgccaacggctttcttggcaagggcgctggacccgacgagttggcggagggaatccgaagggttgcggccggtgcccacgccctgtcggacaatgcaatcggcgctctggtcagccatgtcagcgacccccatgcggtgccgccggaccccgacaaggcgaaactgttcgaaggcctcactccgcgtgagctcgaggtcgttcgcctggtggtcgagggcctcgacaatgcggagattggtcgacgcgtcttcatctcaccgttcaccgccaagacgcatgtcaatcgagcgatggcaaaggtcggcgcccgggacagggcccagctggtctccttggccgtccaggccggtatccggccctgaggaggacggttcggcgcgccagttggatctggcctccactacgacggatgcagtagtgatccagctgcgttgggaggacgcggccgcggctccccgctgtgatggtggtgtgtgtggtcgatcaggccgccagatgtccaccccagcaggaggcgatgcgccatgcagtccgaagatccgccgtcgaacctccccgtgcgcgacggcctggcgaagattcgcaggggaatgggtgacgccaatcttcgctatctctacttcagtgtgctcgcggtgccggggcacctggcgatggcgggcgcgaagggcgtcgtattgttcacgggattctccgccttcatggcggcaaatgtcctgttcacacttggcctggccgcgatgaaggtcgtggtgatcagggctgcatggggagcgggttcagccagcgcttgcgtgctgccgcgcgcatatcaggtgattggggtgctggtcatcgtgttctctgctgcctttgcggtctcctgccttccattggcgcttggctcgagtagtagtggcaattacagccgcgtccaggcaatcgccatcgccacgatcacgttcacggagttggcgatggccgtccacggcctgttgtcgtcaggtcgacgacgtaatcccctgatggaggccatcaagctcagcaacctggcggcatcgctcgtgctgttggtgatcacacagactgcgttgctctcctttgctggtgagggcggggatccttcccggtacaacgggtggttcggcatcggtatggggttatcggcggtctcggtgggcgtttacatggtggtgcggcatgcccgcctttcgaagggggatttattggggcctgattcccaacccgcgaatttcgcgcccaatgcccctggagtgtgaagacggtcccgcgccatcggcggctcggggtcaccggcggcgtgatcgggcggcaggtcaacaggggtcctctttcttggagggggggctgtgatggatcgggacaagcaaacggatcaggacaagcggggcccgatcgggccggatctcggaatgatgcccgggatgaactcgtcgcccaccggttcgtccttccgtgatggtgggagcaggcaacccggaagctccggactcgtcgtgtccgtgacgattgccttcctgctccttgtggttgtcgtgctctgtctcgtggccatcggctagggactgcaacccggcgcgctgtgtcccgggctgccagactgggcgcatggatcgttcccccggcgacgtggcccccttggtcctggggtggccgctgcgagggttcgtgatggcccgcaatagtccggctcggcgggtgccgagccatggcacccacctgatgggcaccatctattccatcgacctcatcccggttgatgcgcgcggccgggccgccccctggacatggcgcaccgcgctggcaaccgaggccccggaggaattcgtcggcttcggagctcccgtcatggcgccatgcccgggacgggtcgtcatcgtccacgacggggagccggaccacagggcccgacgctcccaactcgcactcatcccctatgcactgggacagccgaggcgtctcagggcaggtgcggccggggttgccggcaaccacatcgtgatccggatcggtggggacgggccgttcgtcctgatcgcccaccttcagcagggatcgctgaccgtcagcgcgggggacatggtccatcgcggcgagccgatcgcgtcctgcgggaattcggggaacagcagccagccccacgtgcatgtccaggccaccgacactgtccaatgggaccgtgccgtggggctcccgatcgcgttcgacgcggccgggaacccggtgctcccgggggagtcgcagatcatccgtgccggatgaacaagcaggtgtctggccgcatctcccggggcgcccgggcacggtgacctcagtgcttgtcgtgcaccgtgacggcatatccatcgggatcggcaaaggtgaacgtgagtccgaaaggccccgcagtcgggggttggaggatcttgacgcctgcgtccgcaagcgcgtcgtgcaaggcctgcacatcgtcgccgagcagccacagggcaacgcccaggccgggccgtgacggctggttgaggtcaacgcccggcagcggctcgcgcagcgcaaaggggatgggtgaggtggcgaaaaccacggcgccgggcggcgagacgggcgcgcgatgaaggcccagctgggtctcgtagaaccttgcagagcgatcaaggtcgcgtacctgaagggcgatgaagtctggtccggtgacggtcatggtgcttcttcctgagatggatgtcagtgccctgacatggacactatatgtcaaaatactgacatggatcaagatgtcatgggtatcggtcggcagatcggttgccagctgaaggaagtccaggccgtgttgcgtgcccggatggacgaggtgcttcgcccccttgggctgacgacgccgcaatatgcctgcctcactgcgctggagcagactcgaggggcgtcgaactccgagcttgcccgacgcgccttcgtcactcgccagacgatgaatgtgttgcttcgtggccttgaggcgaggggtctggtggcccgggctgaggaggcgccccatggccgcgcccgtccggtatcgctcacaggcgaggggtccgcactgttgattcaggctgcggaagccgtcggggtagttgtgatgcgcatggtggggtcgttggacgatgcgcagcgcacggacctccacgatgcgctgaacagctgcattgaagcgctgcgctgatcagagttacgcccttctgttcgtgtctggtgagggtctcgagggatcgtccacggaatcggtgtacgatagttgcatgactgttgaactgatggggggctcgtcatccactgacatggaggacgaggcgcgggtgaaggtgttcaaggccctgtcggatcccatcaggctccagatcatccgctatctcaaccaggtgcatcgcggcgtgacgtgtggggagatcggcggggtcgtcgacatcagcaagtccgccgggtcgtaccacttcaaggtgctgcgcgaagctcgcttgaccatcacccgcaaggagtcccgggagaagtacgtctcgctcaattacgagaccctcgacaagtacctgaccaggttcttcgacacgctgtagtcgggacccaactctcatccagcaagggaggagtggctcatgccgctctatagttcaaaagaagtagaacaattgaactggaagggtgtcgtccgaggcgacgaccggaccaccacagggcgtgtgcctccgacgagcggccagcgctgggtgctggcgctcacctcgcttggattcttcatggccatgatggactcgatgatcgtcaccactgcgtccacggccatccgcgctgacttcggggccacggtcggccaactgcagtggatgctgaatgcctacaacgttgcagtcgccgccttcctcttgatcggcgtggccctcggcgccaggttgggctaccggcgcatgtatgtcgtcggactcatcgtgttcgtcgtcggctcggtggtcgcagccctgtcgccgacactcgacgtgctcattgcggcacgggtggtgcaggggatcggtgcctcggtgatgacgccgatgtcaatggccatcctcaccagcgcattccccgccgccacaagaggtcgggcactgggcatctggagcggcgtcgggggattggcgctcatcatcggaccggccctgggtggcgtcatcgtctccacctggggatggaactggatcttctggatcaacgtgcccatcggccttgtgggggcctatttgtcatggcgcaggctggccgagtctcacgtgggtggcgattggccgcacccgctcgattcggtgctggtggtcgctgcctcgggcgccatcgtgtgggcgctgtcggaatcggtgacgcatgccagcatggtcccgccgacagtggtcggtgccctcggcatcctgctggccgtggcattcatcgtgcaccagcaccgggaatcgactcccatggtgccgctcggcctgttccggtcgtcggccttcagtggcggcgcagtggccactttcctgctctatgcggccatgtacggcgtggtgttcctgctgccccagtacctgcaggcggtgaccggtgcgagcgcactgcgcgccggactcgaattgcttccgtggacgggcacattggtcgtcttctcgccgttggcaggtcgcatcgtcgaccgcttgggtgaacgactcgtggcgctggtgagcctgctgctccaggccgtcgggtacctgtggctcgccctcagcctgtcgcccggagcccgttacagcacgatggtcgcgccgctcgtgctgtccgggatgggcatctccatggcggggcccgccctgcagaaggccgtgctcggcgcggtggaccggacgcagaccggaatcgcctcgggggtgttcaatatgttccgccaacttggtggcgcgatgggcacagccattgccgtgatggtcttcacggcgttcggcgccatggccccggtcggccggttcgctgccgggttcagggcggcgatggtcgcctcggcggcgctcgtggcggccggcgcgatcagcgccctcgacctgcaatcactgcgtcatcggccgttgccaacgtcctgaacaccagcctgtggcgggcggttcaccggtacgctgacccacggatctgccgaccccgttggcgatccgacgggcgcgatgacggcgtccgtgcagacagtcgcaggcggccaatgcctggggcggaacaggatcagcgtgactcaccacggctcagcacccgacccctccgcgacgtcagatgcgccggctgcgacaacggtcgagccgctgttggtgcatccccggaccatccgcaaggcgatcaccggcaccgccgtgggcaacttcatggagtggttcggcttcggcatctacggatacctggcggtcaccatgaccactgtgttcacttccggggtcgagcggtcggccggcctgctcatcacgctgttcggcttcgcggtgagcttcgtggtgcgtcccatcggcgggctgatcctcgggccgcttggtgaccgcatcggacgcaagagcgtgctgttcctcaccatggcgctgatggccatcgccacgaccctcatcggcgtgctgcccacctcgcaacagatcggcctgtgggcgatcgtgcccctctatctgctgcgcctggtgcagggcttctccaccggcggcgaatacgccggggccaccacctatgtgtcggagttctcacccgacaagaagcgcggcttctactccgcctggctcgacgtcggctcctacatcggcttcgcggccggatccggggtggtgggcctggtcaccgtgatcgtcaaccacctatcggggcccgatgccatgctcgactacggctggcgcatccccttcctcagcgccctgccgctgggcgccgcggcgatctacttccggatgcgcatccccgagacgcccgtcttcgaggaggagtccgatgagctcgacgccgagttgagcgtcgccgctgccgacgatcccatggcccgccacggcgtgctgggcatcatccgccaccactggcgtccgatcctggtgtgcatggcgctggtctcggccacgcagtgcgcggcctatgccctcaccagctatatgccgacttacctcgaggaagaagtgggcgtcggcaacctgatggcagcgctcgccaccgtgcccgtgctcatcgtgctgtcgttcgcgctgcccttcctgggccggctcagtgaccggatcgggcgcaagcccatctactggatcgcggtggtgctcaccctgatcaccatggttcccgcgttcgccgtgatgcggatcggcaccgaggctgccgtgctgggtgcgctgttcatcgtcgcggtgcccacctcgttctacctggcggtctcggcgtccgcgctgccggccctgttccccactgcaacccgcttcggtgcgatgggcattgccttcaacctggcggtgtcgctgttcggcgggacgacgccgctgatctgccagtggctgatccagctgaccggaaacccctatatgccggcgttctacatcatgttcttcgcggtgatcgcgggcattgcgctggtgccgatgaaggagaccgcgggccagcccctcatgggttcggctcccgtggtcgaagcgcccgaggattccccgatccctgcctgacatcacccgtcccgcggcacccggctcggcatcggccgacgcgctacggctgctcgccacgtgggtgggcgtcggtcagccggccgaaatcggcttgtccgcggcggtcaggtcagcgaaggcctcgtcgagggcacgtgccaacgaggggctctcgtgcagtgcccagcgttcccaggcgacctccagggcggccaggccggccatcgcggcggtatgtgcacggtcggccggcacgccatgacccaccagtgccgcggtcagcgagggctccagctgcaaccggcggaagctcaggcgggcacgcaacgacggggtcgcatggatcatgcgtagctggtcgagctgggaactcgtggcgccgcccaccccggcgaggctgtggcggaaggtgcgttgcagcaggctccagcaactgtcgtcggggcgcaggtcaaggtctgcgagcacggccccgaaatcaaagttggagccctcgacgctggccagcgccgcgtcctccttcgagctgaaatagcggaagaaggtggcccgtgagatgccgacggcacgcgcggcctccgcgaccgtcacgtcgtcgaacccgcgcgcgacgaacacctcgctgagcgcttcggcgaggcgttcacggaacatctcgcggctgcggtcgcgcactcgggttggcatggcgccagcgtaacaccacttgggactcggtctcaggggtgatactgtctctcacggatgagacgcagtctcactcccgaattcctgaccgacttctctcggaggttcagaattgactgaacttgaaagcacccgcagcaccgtcgcggggcatggcgcacgccaccccggcgtgatcgtggcggtcctagcgtccgcgggcctggtggcctcgttcatgcagacgatcctcattcccatccagagctcgctgcccgaacggctggcgaccacgcgtgacaacaccgcgtgggtgatcaccatcaccctgctcgtctcggcgatctgcacgcccatctcgggcaagctcggcgatatgttcggcaagcgccgcatcgccctgatcctgctcagcctgctggtcgccggctcggtggtcgccgcagtgtcgccctcggtcggccccctcatcgtggggcgcggattgcagggcatgggcatgggcgtgatcccactggggatctcgctgctgcgcgacctgttgccaccacaacgcctcgggtcgtccatcgccttggtcagcgccacgctgggcgtgggcggggccatcggccttcccatcagcgccttcgtcaccgaacacttcgactggcatgtgctgttctgggtggccgcggcaatgggtgcgatcgtcgttgccctgatcgcctggctcgtgcccgacgccggggtgcgtaccggcggtcgcgtggacgcggtgggcctgatcggcctggcgctcgggctgggtggcgtgctgctggccgtctcgcgtggcaatgaatggggctggatctctggcacgaccctcggcctgctcggcggtggcctggcagtgctggtggtctgggtcatcctcgaactgcggatccgcgagccactcgttgatatccgggtggccgcgcgtgggcccgtgctgatgaccaacctggcctccatcgccatgggcttcgcactgttcgcgtccagcatcgtgttcccgcaactgctgcaattgcccgaagccgtgggcggcaccggcctgcccctgttgagggccagcctgatcctggcgccctcggggctggcaatgctcatcatgtcgccggtggcggggcgcctcgagaaggtctggggccccaaggcgctgctcgtgctcggggcggcgatcatcgccgcaggctatgtgttggcggcctcgctgcacctgcatgcctggcatgtgctgctggtcaacggcctcatcggcgtgggcaccggcctcgactatgcggcgatgccgacgctgatcatgcgtgccgtgcccgaatcggagaccggcgccgccaacgggctgaacaccctgatgcgctcgttgggaaccgcggtggcctccgcggtggtggccagcgtgctggcctccatgtcgtccacggtcggtggccagtcgatcccctcggctgacggcttccacatggcgctgatcctgggcctggtggcggcagcggtctgcgcggcgatcgcggccttcatcccgacccgccgcaagggcaacgaggtggccgaccaggctgcccgcgtgctcgcgcaacatgacggcgaactggccggggcaagggcctgagccgctcgcaacgcacccggtggcgtcggtggggaacggatatatccggccctgccggcgtcaccgtgcgttagcgcatgaatcatcgcgcacgctgctgatccgggatccggaactgccgcgccgggcgctgtgatgatgacaagatccaagggtggcaaacctagacattgatcgtctcgcggagacgttgcgcccccagtacaaggctgtcgtcgcgcgcaaccccggagaatccgaattcctacaggccgtctacgaggtgctgctgggcgtcggcccgctcgccggcaagatcccggcctatgcgcagtggtccgtgatgcagcgcatctgcgaacccgagcggcagatcatattccgcgtcccgtggatcgacgacaagggcgtggtgcaggtcaaccgcggcttccgcgttgagttcaactcggcgctcggcccctacaagggcggcctgcgcttccatccctcggtgaacctgtcgatcatcaagttcctcggcttcgagcagaccttcaagaattcgctcaccggtatgccgatcggcggtgccaagggcggttcggacttcgaccccaagggcaagtccgagaacgaaataatgcgtttctgccagtcgttcatgacggagctgcagcgccacatcggcgccaccacggacgtccccgccggcgacatcggcgtgggtggacgcgagatcggctacctgttcggccagttcaagcgcatccgcaaccagtacgagtcgggcgcgctcaccggcaagggcctcacctggggcggctcgcaggtgcgcaccgaggccaccggctacggcctggtgttcttcgtcgaggagatgctcaaggcccatggccaggcgctcgacggcaagcgcgtggtggtctcgggttcgggcaatgtggcgctctacgccatccagaaggcccagcagctcggcggcaatgtgatctcctgctccgattcgtcgggctatgtggtggaggagtcgggcatcgacttcgacctgctgcgcgagatcaaggaggtgcgccgcgggcgcgtctccgactacgccacagaacgcggggcgtcggccacctacgtggccggcggcagcatctgggatgtgccctgcgacctggcgctgccgtgtgccacgcagaatgagctcgacgagaccggcgccaaggcgctcatcaagaatggcgtgcagctcgtggcggagggcgccaacatgcccaccaccccggagggcaccgatctgctgcgcgacgccggcatcctgttcgcacccggcaaggcgtccaacgccggcggtgttgccacctccgcccttgagatgcagcagaacgccagccgcgacacctggaccttcgagtacaccgagaagcgcctggaggacatcatggtgggtatccaccaccgctgcctgggcaccgccgaggagtacggcgttcccggtgactatgtggctggcgccaacctggccggctacatcaaggttgccaatgccatggtcgccatgggtgtgatctgagtcatccgttcggccggaagggtcgtgcccaccgttggtgggtgcggcccttttgcatgctccggggcggaatccggccagcggaggcgggacggggaaccaccgggcgtccaaccgcctcagcgtccgggcgcagtccccaacgccttggcaaagaacagggttgcgtagggattgtcgttgtaccggtcgattcggtgatagccgcggtgttcgtacaggcccacggcgtgggtcagtaggtcgctggtgtcgagcagggccctggtgaagccgtcgcgtgccgcctgctgttcgacgtgggccatcagccgattggccacgtccatcccgcggaagtcgggactcacccagagcttcttgatctcggcgtcggtggggcccagaggccggtagccgcagtatccgatcgcctgcccgtcgtgcagtgccgccacgtagtactcgtcgggtccatagctctcctgtccgctcgggtcgaaaccaccgggaaggctcgtctgcagttcggcgaagtacaggcccaacaggtgatggcccagcgcggagtcgggtggggcaggggtgaagctgatcgacagcgacgttgacatggttgtgaacctagcccgatgcccggggcggccgaccatggtttctcatcgcggagcggtcaccacaatccaccgaggaacagtcccagcacggcagcggcgcccgcgaccaccagcgtggcgacgtcgaggccgatgcctgcgcccggacgcccactgagcatgagccgcacgacctccacattggcggtgctgaaggtggtgaagccacccatcatcccggtgcccagcacgacggtcagcggggcaaggctcgcgtacgctgcggccagtccggtgagcagcccgaggccgaacgaccccaggacgttgatggtgaaggtgcctgccggcacactgcgtgaccaatgtcgcgcgatcaggccgtcgagtcggaagcggcaccaggcacccacgcccccggcgacgaacactccgagccacagcaggggagcggtgatgttcatgggcgcaccgtctcgccggccgtgcgggccatccggtccgccaccacgatgccgagccagacgcaggcgataccgcccagcaggctcgcgaacagatagcccagggccatccagacccttcccagctgcatcagcgacagggtctggacgatgaaggtgctgtaggtggtgaagccaccgatcaccccggtgcccacgcccaggcgcacccggcggcgccagccctcgtcgggtccggtgagcaccaggaaccgtgacagccagcccagcgcgagggcccccaccaggttgatcgccaggatcgtcgtcgggaagctcccggcatggtcgggggccacggtgctcagcgcaaagcggatcgtcgcgccgagcccgccacccaccgcgacgagcaatccgccgggccagctcacagcagcggctccttccagtccacgaccgacaccggcaccaggatcaccggacgatgctggtgatgggccaactgggtgcccaccgagctgcgcaggaactccaggggatcgcgccggcggccgcgtcccttcgcgccgatcaggaacgccgaggcgtccacggcacgtgccaggtgggtgagtgcccgatccgtgcgtccggcaaggtagcggaaatgccaggtgacgccgctgccgtggcacacgcgggcgagttcggcggtcagtgccttctcgcggtcgtgccaggagtcgtcgggaaggtcggagtcgagctcggtgtggcgcacggtgccatcgggatattcagccaccgtgatgcgcgtgggatcggcatagccgatgtacagctcggcgcccaggcttgcggcccagctcagggcggtgcgcaccaccagctcggaggtgcccggttccaccccgacgaccaagggatgtgaggcgggcgcgacgatgcgctcgacgcttggctggggcacctgcttggccatgggaaatccgatccggggcagcatccgccccacgacatgggacaggaatcatcagccggacggcggttcgggccgaggcccaggcggaatccatcgccgcgttcatcctagccccggccacgcgatgaccgctgccggccagctcggcgcggacgcctactcgaccagttgtgcctcgtggacggcgaccctgtcggcggggccggctgcgtgcactgcgaacacatgcgcgggggtccattcgcgtgccaggtaggcgtcggcgacggccctcttcacggcatcaagggcagccaccggcacgagcgcgatcgccgagccaccgaaaccgccgccggtcatccgcgcgcccagtgctccggcgccgcgggccgccgcgacggccaggtcgagttcggggctgctcacctcgtagtcgtcgcgcagcgaggcgtgtgattggttgaacagctcaccgacctgctggaagtcgccgtgttccagggcgtcacagcactgcctcgtgcgggcgatctcggtgacgacatggcgtacgcgacggcgcagggtctggtcgctgagcctcgacaatgcgtcgggaagctgctcgggggtgatgcgtcccagcaggtccacgccaagttcgcgggcggcctgctcgcaattcgcgcggcgggcggcatactgcccatcgaccagtgcgtgcttggcgcgcgtgtcgatcaccaacaaccgcaggccgtgggccgccacgtcgaaggggatctggcgcacccgggcgtcatggccgaagtcgatgagcagggcatggcgtggcaggcagcgcagggaggccgtctggtcgagccccccggtgggtgcaccgacgatgtggttctcggcgcgacggcacgcgtcgaccagcgtgacgcgggatgcgtcgctgtccagcaggccgaggttgaacagccccgatgccgcaccgcctgcggcgccctcgatggcggccgaactcgacagtccggcgccgatcggcacatccgaggtggtggccaggtcgagtccatgcactgcgaagccccgctcgcgcagcgcccagatcgtgccggccacatagcccagccagccgccgggaacccccggtgccacgtcgtcgaggctgacctccgcctgctcgtcgaagtccagggacgcgacccgcacgatgtcgtcgtcgcgggggccggcggccgcataggtgcgttggggcagggcgatcggcaggcataggccgccgttgtagtcggtgtgctcgccgatcaggttcaccctgcccggagctgcccagacgccggtgggggcgtggccgaagatctgctcgaagcgttgcgctgcagtgtgtgcgagctggctcatggttgctcctcaacggcgtcgttggcgtgtgcgtcggcggcgacctgcacagcgccacccacgaacaatgttagcgagaacatcatccactgtatgccgggattttacgtcgcggccacgcacgacgcggctgccgctctgcattcggggcctgccggcggcgggccggtgtggtcgccgccttcatagctcggatcgttgacgcccgggaccacgtgatgggtacctgttcgcaacctgcggcaaggctctagccttgggccatgagcgagacacccagcgaaaacgggcctgttgagcccgcgcggcatttgttggccgataacggagttgtgccgaacagcgcgctgccagcactggtctacaagcaggccgcgccccagcgcagcgacctcgatgattggttccgcacgaccttcgcggagaaccgttgggtgggtgcgcgcgacgacatgctcagcgacaccgaccattaccactccactgcgttcgccgtgttcggcgtcgtgagcggttccggcgaggtcgccctggggggatcgggtggcgtggagatcgccctgaacgcccgcgacgtggtggtgctgccggcgggggtctcatgccgacgcgtctccggcgacctccgggtgatctcggccttcttcgaggagccgcatcccgacaccctcactgtggagccggtcgaacatgacgcggcggccgagcgcatcaacaatgtctccccgcccgatgttgaccccatctacggcgacaacgggccactcgaccggatctacggctgagtctccccgttcccgcgcagcagaccgggatcagcgcgtggggtcggcaggatccgtcccggcggggccatccgcctgcgggtgaggggccttcgccggacgcggggcccttcccggacgggtggccggcgggatgaggggcctggccgagtagctgcccggcgcatcgaacaacacgcccgagccgtccagggccgcatcggagagccgcttgggggcgagccagtaggccaggtggaagaccacgaccgtcaccagggtgcccagcgcgatgccgcccagggtgaagctgtcgctgaacttcagcgagacatcgccgacgccgatgatgatgccggcagccaccggaaccaggttcaccgggttggcgaagtcaacccggttctccttccagatcttggccccgagcaggccgatcatgccgtagagcaccacgcagatgccgccgagcacaccaccgggcatcgccgagatcactgcgccgaacttggggctcaggccgaacaggatggcaacgatcgcggcgaccacataggcggccgtcgagtacacgcgggtggcggccatcacgccgatgttctccgaataggtggtggtggggccggctccggccagcgtcgcgagcatcgaggtggcgccatcagcggcgatggcgcggcccatctggtgatcgaggttcttgccggtcatctcggcgaccgccttcacgtgaccggtgttctcggcgatcaacgcgatcaccaccggcagcgccaacaggatgaacgccaggtggaacgacggcaggtggaagcccaccacattggaggcggggaagtgcgcgacgccattggcgtccatggaataggtccacgtggccagatcggtcttcgggggcagtccgaaccagtccgccttggcgacacccgaccagtcgacgcgcaatacgtcggtggcctgcccgtcgacgaccttgtgcatcgggccgaacaccacgtcctgcagccagctgatgagatagccgatcaccatcgacaagaagatcgcgatgcgcgacaggaatccgcgcggcccgaccgacagcgccaccacgacgatcatcgtgatgaaggcggtccactggtcctggggccagtagttcttggccaccacgggggccaggttgaacccgatgagcatgacgacggcgccggtgaccaccggcggcaacaccttgtggatcacccgtgagccggcgaagtggatgatcaggccacacatgaacagggtgaggcccaccacgaacagggcacccgagacgtcattgggcttgccgccggccgcatagatggcggtcgcgacgccggggaaggccgccgaggaacccaggtagctgggcacctcgtgcttggtgacgatgatgaagatgatcgtcgagatgccactcatcatcaccgccagctgcgggttgagccccatcaacagggggaagacgaaggtggcgccgaacattgccaccacatgctgggcgccgagcccgatcgtctttccccagctgagccgctcatcaggggccacgacctcgcccggtttgagaacacccccgttgtgcagcttccagatcattgtgcctcccgctttccgtgcctggtccgcgggacagtgtaggggtaggcggcccgactacgggacagcggtccatggcgttgtcacaccgcactggagcggtgccggcgtgcgggggtggtcagcccacgcgcgaggtggcccaggccatcgccacggcggccacgacgcagaagatgccgacgccgatattgagcggcagacgataggtcagcacgccgatgtactcgcgcaggtaggcgcccggcgcgtagtaccaggcggtgtgggccccggtgacgaacacgtcgtccaggcgcaggtcggcggccagcacgtcggtgcgggtggtgtggtacgagctcgtcacggccagcatgggcccgccgatgccacgctcccgcaacagcctggtggagttcaccaggttctcccgcgtcgagcgggagcggtcctccacgatgatgcgctcatcgggcactccccgcgatgtcaggtattcggccatcgcctcggcctcggcacggggctcgtccgagccgcgtccaccggagaccacgaacatcggacgacgtccctgcagtgcctcctcggcgctcacctgcagggcgcggtccaggcgcgacgccagcagcggcggcaccttcccgttgatcagtccggaacccagcacgatgagcacatcggggtcgggcacgcggcgtcggcccccgaacagggcgcgcaccacgaactgggccagcatcaccacgaggaaggtgcccaggtaggtgccgatgaaggtgaccagggtgaacagggccatcgaccaccaacggtcgttgcgtgccagcgaggcggtgacccccggcagcaggagcagggcgatgcccgccgccagcacgagcagtccggtgcgggagcggatgccctcgcggcgcagcacgatgaggccgtcgatcaccagcagcagggggagcatgcccatcgcggccagccatgccaccagcagcacgccggcgatcaccaggaagatggcctggccgcgctcaccgaacatcgggctggccgtgaccagggtgaccagcagccagaaggcggcgatcagcagcagcacggcgcagcgcaggcggcgcggatcgcggcgggcggtgacccacaaggcgatcaggctggccaccgtgaacacggccgccgtgacgaacaacacccacaagccatcggacatggtgcatattgtcgcattgccgcgggtccgcgccatgcggggcggacgatcagatccagctacggaaccacatgcgcagcagccactgccgtcgggtcatcagctcgtcggtgaggatcggatagatgaacatgaagttcgcgatgatgatcacggtggccgcggtgacgatgatggccccattgcgtcgccggcgcggtggggcgtcggagggccccagcaccttgcccagcaccatcgccaacacggtggcggtgaaggggatcatcatgatcgcgtagaagtagaacgtgggacggtcggcgttggggaaccagcccagccaggtggtcgcggcggcgatgatcggcacgccgaagcgccaatcgcgtgcgccgatccagatgaacagggcaatgatcaccgccagggcggccatccaccacagcatcggcgtgccggcccccgacaccacgcgcaggcaggtgtcgcccaccgccttgcaaccgtcgtcgccgggctggatgtcgttcaccgcgtcgatgccgatcacccgtccgatcaccggccaaccgaaggggtgggcctggtaggtgtgggtctgggaggcgatccagtcgccggtgtggaaggcgtagatctccttgtggtactgccacaggctcgccagcggcttgccgatcagcttcaccagcggatcgtccggatgggaggcgccccactggcggtcatagccaccctgggtcaccagccagctgatccaggtgagcacgtacaccggcacggccacgacgaccagttggacgaatgcggccaggccgtcgcgccacaccgcatgccaggcccggcgtccggcaccggcggtgcgccgtgcgctgcggtcgtagatgacggtgaggatgccgaacaccgccagcacgtacatggcgttccacttgcagccgcaggccagcccgaacagcacgccggaggcgatcaaccatggccggaacagcaacagcggaccataggagccgcccaggttgagcaggttgttggcgcgcaggtgctcggccagccgatgtctgaagtggtcgcggtcgaccagccaggccgagaccgccgccacggtgaagaaggcctcgaagatgtccagcagggcgatgcggctcatcacgaagctgagtccgtccacggtgatgaacagtccggccaggcagccgatgagcgtggagcgcgacaacctgcgcgccatcctgatgacgatgccgatgaacagggccccgaagaccagtgccgcgaagcgccagccgaaggagttcattccgaacagcttctcgccggcggcgatgagccacttgcccagttgcggatgcacgatgaacgaggcattgctctgccacaggtcagtgctgcccgtggcgatccgtgcgtccgcggtcgacggccacgcccgctcatagccgaagtgcaacagcgaccaggcgtccttggcgtaataggtctcgtcgaactccaggcggttgggtcgcccgaggttcaccaggcgaatgaggaacccgaccacgacgaacgccgccgtgaggatccaactgcgccaccggtcgcgttgcaggatcgtggcgtcgtcgagcttgtcgatcgtcgacatcagcaacccgccgcgacgaagtggccgggtcggtgcttctggtgccggcgcaggggcggggggcagggtgctcacgtcgacatcttagaagtgccggccatgaaccgcccgggtgtcgtgcggcgtgggctgtgaacatggggggagaacatcgtggtcgtcccgttcgggcgcaatgtgccgccggacgcccgctgcgcgctcgccacctcgtgggtggtgctggctacgctgttcggcaggcgtcccggccggcggatcacgacggggcgacgtgaggaggggcagtggaccgttatcgcatcgaggtggcgcggcctgcggcatcgccggcggacgccttcctgctcggtaacggcaacctgggcgtggcagtccatggcgcgcccggcaccgagaccctcgatctcgggctggactccttgtggtcgggtggcccgctcgacgcgacgccacggcgcgccccggggttggtggaggcgctgcgggcggccatcgtcgccgggaactcgccgcgcaccgagcaactggcccggaccatgcaacatcctgttccgcccaccccggcactgcagcaggacgggcgtcgcgacagcccccagccgctcggctccctgcggtggggatatgcccccgacgtcgccgacgccccgcacggctactcccgcgtcctcgacctgtcgagggccatcgccacgacgcgcttcgggacgggccggcgcgggaccggccagctcgactgcttcatcagtgcgcccgaccacgtgctggtggccgattggatgggcgcggctcacgagctggtggcgccagaattcgactgcccccacccctgtgagcgccagctgaggcgccgcgggggacgcatctggttgaccgtcgccggaagggcccccgtggaggcgcccgcggatccctcgtacgcccgtcgggccactgccgtgcactacggcaccgacgcgcccgatggcgaggggcgggtgccggcgggcatggcgttcgcgctcgtggtggcagtcgaggcgactgcgtccggcagcaggctcgtggcagccgcccgcgatggattcctgggatggcagaccaacccgatcggcgatcccgggccgctggtgcgagccgccggccagcaggtcgacgccgcgctcgccatggacagcgagttgctggctcgacgccacgtggccgaccatgcggccctgttcgaccgcgtcgaccttgatctgggcgccggggatggcgctgcccgcgacgaactggccttccacctgggccggtcactgctcatcgccagcacgcgccggacgagctccatgccgaccagcggcagcctgtgggcgaccaccaggtccgcggaccccggcgatgccctcgaacgcagcggcggcgggctggcaccgctcggcctcgacgtggtcgggctgggggagctgatggaccccgtcgaccaagcggcaggcgaactcgtcaccgcggggcgtgccaccgcagcgaacagctatgggttcgccggggcctgcgtccacggcacgcccgacatctggcgccatggcgcacccggcgaggggcccaccgaccaggccaactggccctcggcgctgctgggcctcatcgcgccgttgtaccggcacgcggcgcacgggggtgaccgtggggcggcgctggaggcgcaccgtgcggccgtcgagttcgtgctcgatcagctcatcaacggtcccgacggtgcgctcctgccgtgtccgtcgaccttgcccgggagcctgtgcctgggacccgatggacgcctggccggcgtcggtgcgggatcgtccttcgacctgtcgctggtgcgccagagcctcgagcactatgtggagctggtgggtgcccgtcccgggtccgccgatgcggcgctggtcgtccgcgcccatgcggcactggccggcctcgctccgctcccggtgcgtgcggggaggctgcgcgactggccccggggacgccgcccggccgacggcggcgccggcctgctgcgttccctgcacggggtgttccccggcgagggcatctcgcgacggcgcgatcccgagctcttcgatgccgcccgccgcacgttcatcgcccggacgggagcccacggggacggggcgcggggcgaggggctggtgcgccggttgggcctggccgcccgcctgcgccttcccgacgaggccgccgccgtgttggacgagctggtgggtgggggcagttcggcgtccctactcgccctgcgtgatgccggggccgactccgatgccggggccggttccgatgcgggggccgggccacgtcgctcgctgcccgcggcgatggctctgccctgggcgatggtcgagctgctggtgcaggtggccgacggggtggtggcgctcctgccgacccttccggcgcgatggccggatgggcgggtggccggtgtgcgggtgcccggcgaccactcgattgcgctgagctggcgtggcggcgccctgcgtgaggcgaccgtggctgcccggcgtgacgacgtgctggccctggacctgccccgcggtgagttcgcggtgcgcgatgcggcgggcacggcggtggacgccacccgggtgggcggaagtgaccccgggcggatgctcgtctccttccccgcctcgcgcgggcagacatacaccgtttccgccctgtgatccacgcctgtggatggccggtgccgggagcagcggccgggctctcatatctcgcctgtcggacgatgcggatagtctcacggctgtgactaccagcgacgaaggcctgctgatcctggccggaacacccatcggcgggtcgaaccaggcgtccgaccagctgcgcgagaccctgcgcgacgccgatgtgatcgccgctgaggacacccggctgttccgcacgctgttggcccgcatcgacgtgaccacccgtgcccacatcgtcagctatttcgaggggaatgagtccgaacgcacgccggggctgctcgacgacctggaggccggaaagaccgtggtcgtggccaccgatgccggtatgccctccatctccgatcccggcttccgcctggtgaatgccgccatcaaggccggcatccgggtgacggcggtgccgggccccagcgcggtcaccacggccctggccgtgtccgggcttcccagcgaccgcttctgcttcgagggcttcctgccccgctcgggcgggccgcgtcgtcaccggctcgccgagctggccaccgaaccgcgcaccatggtgttgttcgaggcgcctcaccggctggccgacttcctgtccgatgccgccgaggcactgggccatgaacgggccgcagtgctgtgccgcgaactcaccaagccgtgggaggacgtcgtgcggggaaccctcgatgagttgcacgcctgggccgtggagcatgcccgcggggagacgacgatcgtgatcgccggccacacggtgagcgccgagcaggggctggcacaggccttggtgcaggtgaacgcgcgcgtggccgccggcgagcgcctcagcggggcggtggccgaggtggccgatcagacgggggtgcggcgcaagctgctctaccaggccgcgctcgacgagaaggcgcacaacgccaccggccgcgcggaccagcgcccgtagcgccgggggacgacgtgaggcagccgccacgccactttccggtggagcatttcgggaatccgcaggaattcaggctttccgggaagtcgccggatcaagccggctgaccaagaaacacgttgaccgaaaagcatgttgaccaagaagcacgttgacaaagagaacaagttgaccacgagaaatgggaccgtgcacaccagcaatatggacatcaccacacgcgaggggataatggccgacgtgaagcgagccgagatcgaatcccagctgtcaaaggccaagctgcctgcccttcccgagccactgcccgcactggtcaccgacaaccacacccatgccgacgcgaccgtcgagttctccgggctcgaccccgagctcaacctgtcgtccgcagcggtcgtcggcgtgcaccgcatcgtcgaggtgggctgcgaccagcccagcagcgagtgggcggtggacttcgcggccacccacgaacaggtggtggccgccgtggcgctgcatcccaacgacggagcccgcatggtggcccgtcagggccccgaagcggtcaacgacgtgatgcggcgcatcgagcagctcgccaccgcccatgagcgggtccgtgccgtgggcgagaccggcttggactatttccgcatccaggaccctgccggccaggccttccagcgggagctcttcgcccgccacatcgagattgcccagcgcaccggtcgtgccctggtgatccatgatcgcgacgcccatgccgacgtcgccgcggtactcgacgaatacgggtggccgccgcgcacgatcctgcactgcttcagcggcgatgccgagttcgccgccacctgcctggaacacgatgcctggctgagtttcgccggatcggtgaccttcaaggccaatggtgccgtgcgcgacgcactgcgcagcaccccggccgacaaggtgctggtggaaaccgatgcgccctatctcaccccggtgccgatgcggggacgccccaatgctccctatctcgtgccgcacacggtgcgtttcctggccgcggcacgtggcatcgagaccagtgacgagcaggccttggccgcatggtgccgccagctcgacgccaacacctcgcgtgcctacggcagcaacccgcaggccatcgtgaccggaacctggtgagcggcgtggccgaattcctcgatcccaccagcgtgcggcggcacgccaacgccatcaaccttcgccccaccaagacgctcggccagaacttcgtcgtggacgccaatacggtgcgccgcatcgtgtcgctggccgacgtaggacccgaggatgaggtgttggaggtggggccgggcctcggatcactgaccctcggactgttggcctccgctgccggcgtcaccgccgtcgagatcgatccggtgctggcggcccaactgccgctcaccgtggccgaacatcaacccgatcgggccgggcgcctgcgggtggtcaccgacgatgcgctgcgcgtcgagtcgttgcccgggcccgcgccgacccgcctggtggccaacctgccctacaacgtcgccgtgccggtgctgctgcacatgctcgaacgcttcgcgtcctggcgggcgggactgatcatggtgcaactcgaggtggccgatcgcctcgtggccgctccgggcagtcgcacctacggcgtgcccagcgccaagctcgcctggtacgccgaggcgcacaaggccggaacggtgccgcccagcgtcttctggccggtgccgaacgtggagtcgggcctggtggcgatccaacgccgcgagccgccggccaccagcgcctcccgggagcaggtgttcgccgtgatcgacgctgccttcgcccagcgccgcaagatgctgcgctccgcattggcgcgcatcgtgggaagttcggcggcggcctccgccgcgatcgaggcggccggcatcgacccgacggtgcgcggtgaggcgttggacatcgccgccttcgccgcgatcgccgagcagctgccgcacgccacaccgagccgctgatcgcgccgaccgtgccggcagggcgcgcgggaggatcccggcagccccgggtgcagttccgggatacgttgagggtgtgagcgagaccgaattccccgccagtggcgcccgtggcctgggcgccgtggacctgcgtgtgcgggtgcgtgttccggccaaggtgaacctcgcactgcgcgtcgccgcccgcggtgacgacggctaccaccaactcgccaccgtcttccaggccgtggccctgttcgacgagctcacggccgaacgccgccgcgacgatgccatcaccgtgaccacgcgcggcctgcacgcccaccgcgtcgacgatgatccgacgaaccttgcggtgcgggcagccgtggccctgcgccaccacttcggcaccgccgacctgggcgtccacctgtcgatcgacaagtcgatcccggtggccggtggaatggccggcggctcggcggatgccgcggcgtccctgcttgcctgctcggtgttgtgggacctggacaccactcccgacgacctggtgcaactggccgccgatatcggctccgacgtgccgttcgagctggtgggcggcacggcattgggccgtgggcgtggcggcgatgtgatgccggcgctggcgcggggcaactatcactgggtgcttgcgctgagcgatcggggcctgtccacccccagcgtctatgcctgcttcgacgagcaggtggatgccggcaaggtggtgcccttgcggccggacgacccggacgcctgcaccgccctgctcgacgcgctggccagtggggacgccgcccgcgtcgcgccgctgctcggcaatgacctccaggaggcggcctgtcagctgcgtcccgagctccgcgaggtgctcgcggcgggcaccgcagccggtgcactggccgggatcgtgtcggggtcgggccccacctgcgccttcctgtgcgcctcccagcccgatgcctatctggtgcagaccgtgttgcgcagcctggagcaggtcgacgagaccctgtgcgtcaccagtcccgcacccggggcccaactggtggtcagctgagcgggcgctgccggcccagtcctgcccgtgcccgtcagtcctgcccgtcggcccggtcgacgggacctgaatcgtcctcggacgacgcgtgggacgacttcgcggcccgcttgcgggcggccgcagtggcgcccttgctggccgtgcgggccggacgcagcttgttggtgtggcgccgcttgcccggcaccgcaccgcggtcggtgatcagggtgggcttgtgctcgatgctggccagcccgttccatgccaggttcaccagctccgccgcgacgcgtcgcttgtcgggcttgcgggtgtccagccaggccagcccggccgacgccacgagtcccaccagcgcctggctgtagacgccggcgatggtggcgtcgtagccccgccggatgagcgggggagccagcaggtcctccacgcgggtggcgatgtcattaaggatcgacgcgaatgatcccgaggcgctgcccaccggggaatcgcgggagatgatgcggaagccgtcgggtgaggcgtcgatgtagtcgagcagcgccagcgtgccgcgctcgatcacctcgcggtagctggtggcgggcacggcgatggccgccatgatcgcattgtcgagggtggtcacctcgcggtcgaccacgacggcgtagaggccctccttgccgccgaagtgctcatagacaacgggcttcgacacctgtgcgcgggctgcgacctcctcgacgctggtgccgtcgaagccccgctcggcgaacagtgaccgggccaccacgatgagttgctcacggcgctcggcgctggtcatgcgggtgcgtccgcgtcgtgtggctagtgctggggtttggcggctcttcacgatcgagggtgtaggtggggtctgaatcctccggcttcgagcagactcctcgcgatgtagttggtcaggttccggaagccgagggcggtgccgcgcaggtgttcgagccgcccgttgatggcctcggtggggccgttgctggtgccgggccggtcgaagaacgcgaggatgtccgcggcgcgctgcttcagggtgcggccgagcttgtggatctcgacgagcgccgcggggacgccggtggtgacggcatcgatcacggcttgcatcatctgcttgcccttgtccttgtctggttcgcggtaggcggcgatgacgcgctggtagatgccccaggtcgcttccacttcgacgtgttgctccgcggcgaacagcgcggtgagccgatcgcgttgcttgtcagtgaggaggccaccgccggtatgcagtgtgcggcgagccttgtagagcgggtccccggcgcggcctcgatgcccgagcgtggcctgctggacccgttgccggcaccggtccaggccatcgccggcgaggcggaccacgtggaagggatccatgaccgggaccgcggcggggagctcttcggcggcggcggtcttgaagccggtgaacccgtccatcgcgaccacctcgatctgcttgctccattccttcgggcggcccgcgagccagtccttgaacacggccttcgaacgaccctcgaccatgtccagcagccgagccggtcccgttttgttccgattcggggtgaggtcgatgatcaccgtgacgtacttgtcacccttcctcgtgtgccgccagacatgctcgtcgacgccgatcgtggtgaccccgtcgaaccgtgccgggtcatcgatcagctgccgctccccttcagcgaggaccgcactgttcgccgcggaccaggacacgcccaacccggcggcgacgcgggacaccgagaggtggtcgaggacgaggcccgccaacccccaggccagcccaccgcgagagatcttcgcccgctccggcgcggccttggacgtgtcctggcgccacacccgcccgcacccggagcacttgtaccgacgcacccggatcaacaacgtcgtcggccgatgcccgaacggttcatgcgcaagccgacgcgccaccgtgtcgcgagccacgccctcgcatccgcacttgcgacaccagcgatccggttcagcgacgcgacactcgatgaccgcacgatccggctccacgatctgcccgacggcctcaagaccgagctcatcgagtcggcagaacgtggtcagggagggcgcggtgaaggtagcgtggagcacgtcgaggtcttccggatgggcagtgcaggaacttccatcctcgtggagacctcgacccctaccagaccaccgacacgctcaggcgactacaccctcgatcgtgaagagccggtttggctgctcacggcgtcattgtcccacgccgacaacgggccaccgcggccggcggctcccgtcacccggcccgcgacgaacggctgcgcagtggtgtgggttggcctagcggcgctgccaggcggccggacgcaggtcgtcggtcacatggtcggccacgcccagggcgatcgagaagatcgccatccggatgagcaggccgttgtcggtctgccggaagatggccaggcccgggaagtcgtcgacatcgggggacaggtcaaaggagttgtggcgcgagtcgcgcggcaggggatgcatgatgatggcgtccggtcgcccgtactgggtgaggatcgccatgttgagcaggtcgcccttcaggtgcaccgactcctcgtcctgctccgagaggcgttccttctgcacgcgggtgcagtagatcacgtcggccgggccgatcgcctcgcccaccgagtcgcattccacgatgcggttcccgctggcggacaccacctcgaagaactctgcgggcagcgccagggccggcggcccgaagacgcggaaggtcaccttggagtacaggcccaggatgcgcagcagcgagtggacggtgcgtccgtagcgaaggtcgccgagcacggcgatggtcgccccgtcgatggacttgccgcgtgcctcgagctcctggcgcatcgtgaacaggtcgagcagggactggctggggtgctcacccgagccgtcgccggcgttgatcaccggcaccacggaggcgtcggcgaattcggccaccgacccggtgtcgggatggcgcacgaccagggcgtcggaataccccgagaccacacgcgccgtgtcgtggatcgactcgcccttggccatcgagctgaacgtgaatccggtggtggagaccaccgcgccgcccaggcgctggaaggccgactcgaaactgagccgggtgcgcgtgctgggttcgaagaacaggctgccgagcatcgctccctccaggatgcggcacacctgcgtgccctggcccaccggtcgcaacgattcggccaggccgaacaggctggtcaacgcggcacgatcaagctgggacacgctcagcagatgttggccgggaccaaaggggggaagtgaagaaacgggaactgtcgcatcatccgagctcacggtgtgcagcctagaggatcgtcgtggtgtcgcgggcaccggtccacgacttcggttcgccatgcccggtcgccccggcgggccgattccaccgtgacacaccgattgtcccgggccggcgctcgggctctacacttgggaccggtcgccgtggcgatcgttccctggttggtctgccggcagggcccgcctgactttgaatcaggactagcgacgcaggttcgactcctgcccagggagctggctcgtgaagggtcggtggcaagcagtcaccggcacgtggccgcgggcacgcggcgacgagcagctggtgtggaagcaagcagtactgggcaacaagcaatactgaacaagtggtaccgaagttgtgtggcaagcagcgtcttggcaacagatgccaggtgcgctcggacaggaggaatcgcgatgagcacccattccgaacggaccgccccgcaacgctcgagtgacgccaccgccgtgccgcgtgtcgcggccgtgatcgtgctggccgccggcgagggcacgcgcatgaagtcgcgcacctcgaagatcctccacgaggttgccggcgagtcgatgatcagcagcgcgctgcgggcagccgcggccctggaaccccaacgcctggtggtggtggtgggtcaccagcgcgcccaggtcgaggagcacctggccgaggtcgcccccgaggcaaccatcgccgtgcaggaacagcagaacggcaccggtgatgcggtgcgcgtcgggctggatgcactgcccgccgacctgagcggtgacgtggtggtcacctacggcgacgtccccatgctgtcgggtgccacgctgcaggcgctggtcgacacccacaacacccagcacaatgccgccaccgtgctcaccgccaacgtcgacgatcccaccggctacggccgggtggtgcgcgagaaccatcaggtgctgcgcatcgtcgagcacaaggacgccgaccccgacgaactgttcatcaccgagatcaactcggggatctatgtcttcgacgccgacctgctgcgtcgcggcctggccagcctgcgcaccaacaactcgcagggcgagctctatctcaccgacgtgatcgagtacgccaaccgccatcaccatgccgtgggcgcctaccagaccgaggacacctggcagaccgagggcgtcaacgatcgcgtgcagttggcgcggatgaacgccgaggtgaatcggcgcatctgtgagcactggatgttgcagggcgtcaccatcgccgatcccgccaccacctggatccagcgcgacgtcaccctggagcaggacgtcaccctgctgccgggcacgcagttgttgggggccacctccattgctgccggcgccacgatcggccccgacaccaccctgaaggacgtcgaggtcggtgaggacgcgcaggtgatccgcacccacggtgagctggccgtgatcggtcccaggaccaatgtgggcccgtgggcgaggttgcgtcccggcacggagctggcgatgggcggcaagatcggcaccttcgtggagacgaagaacgccaagatcggcgagaactccaaggtgccccacctgacctattgcggtgacgcgatcatcggcgaggacgtcaacgtgggcgccggcaccgtgttcgccaactacgacggcaagcacaagtcgaccacccacctgggcgacgacgtgttcatcgggtcgaactcggtgctcgtggcgccggtcgacgtggccgacggcgccttcgtggccgccggctcggcgatcatcgacgacgtgcccgccggggcgttggccgtggcccgtggtcgtgaacacgtctccgacagctgggtggccgcccgtcatccggggagcaaggcggacgaggcagcccgcaactccaccggggacatccatccggccgtgcaggcaagcaggcaggcgcttgccgctgacgccgccaagaactcatcccaggacaactgaagccccccaggggataagaggagagaaacgggaatgaccggcgtcaagcgcaacagcaaacagcatctgatgctgttctcgggcagggcctatccggagttggcccagcgcgtgtccgacctgatggatgttgagctggtgcccagccgcctcatcacctatgcgaactccgaaatctacgtgcgcttcgaggaatcggtgcgtggctgcgatgccttcgtgatccagagccatccggcaccggtcaacgagtggctcatggagcagctgatcatggtcgatgccctgaagcgggcgtcggccaagcgcatcaccgtggtggcaccgtgcttcccctatgcccgtcaggacaagaagcacctgggccgcgagcccatctcggcccgcctggtctccgacctgttccgcacggccggcgccgaccgcatcatgtcggttgatctgcatgccgcgcagatccagggcttcttcaacggcccgctcgaccacctgtccggcctgcccgtgctggccgactatgtcgagaagaagtacggcggcgacgacatggtggtggtgagccccgatgccggccgcgtgcgcctggcggacaactggagcgaccgcctcacggtgccgctggccatcatccacaagcgccacgaccccaccaaggccaaccaagtgaaggtccatgaggtggtgggcgacgtcgagggacgcacctgcctgctcgtcgacgacatgatcgacaccggcggcaccatctgtcaggccgccaatgcgctgctcgaccgcggggccgcgaaggtgattgcctgcgccacccaccccatcctgtcgggtccggcgcaggagcgtctcaacgagacgccgttcgaggagatcatcttcaccagcaccctgccgattcccgaaggcatcgacatccccaagatgaccgtgctgtccatcgccccgctgctggcccgcgccatccgcgaggtcttcgaggacggctcggtgacgagcctgttcacgaacaagtcacacagcggcccgcagggctgagcctcccgtcccgggtccccacgaccctggtttcccccgttctgggtttcacggtggggccgtgacattgacccccggccagcacatggtcgggggtcaatgcgtgccggggtcaatgcgtcccgggcccggtggtggccccacctgatgcggcgacggttccgccgatgacggggatcggtcgccgttcggctatagttgcccctgccgcttggcgagggtccgcagtgttgtgggccgtgatcgactggtgcgccgcgggtgaatgctccgcagatgcgcgtcgagcatggttcaccctcaggttccctgacacgtcacggtgttgatgcgtggggatgcctcctcacggcacatgttgatcatgaggagaaccgatggctgagatcgagctgaacgccgaaccgcgcaacgagttcggcaagggtgcggcccgccgcatccgccgcgaggacaagattcccgccgtgctctacgggcacggcaccgacccggtgcacctgacgctgccgggccaccagaccctgctggcgctgcgcaccgccaacgccctgttgaacatccacgttgagggcgacgaggacctgctggcactgcccaagcaggtgcagcgcgatcccatcaagggcttcatcaagcatgtcgacctgctgcgcgtgcgtcgcggcgagaaggtcaccgttgaggtgccgctggaattcgtgggtgttgcctcccccgaggcgatcatcaacgaggagcgcacccagctggccatccaggccgagatcaccgcgatcccgaaccgcatcgaggcttcgatcgatggcatggaggttggcgaccagctgctggccggccagatcaccctgcctgcgggcgcggagctcgaggacgatcccgagacgctgatcctgtcggccgtcgcccagatctccgaggaggcccttgaggccgagctcggtgagaccgaggccgaggagcccgaggttcccgtcgccggcgaagagggtgccgagggcgcagaggctgccgagggcgccgactccgagagctgagcgcaccacaccagctgacacgatggggcgggatcacacggcgtggtcccgccccgtctgcctgctcgggcggcgcccactcgtggcgcaccggggtacgtgatcgcaggaccagccggaacaaggccattcagaacaaggccattctgaacaagagtgggcgacgacaagaacatctgcaagaacatctgacaacagggggcaatgatgagctggttggtggtgggtctgggcaatcccgggccgcaatatgccaatacccggcacaacatcggctttctgaccgtcgacgaactggccaggcgggcgggggagcgcttcagtgcctcgcggggcatgcacgccgaaaccgcctccaccaggatcggaccccaggggatcggcgggcccgcccccgagaagttggtgctggccaagccgcgcaccttcatgaatgagtcgggccgcgccgtgcgcaagctgtccgacttcctggacatcgagcccgaccacatcatcgtggtgcatgacgaactcgacctggaccccggtcgcctacgcatcaagctgggcggcggcgacaacgggcacaacggactcaagtcgatccgggcccacctgggcaccggcgacttctaccgcgtgcgcctgggtatcggccgtccgcagggccaccgggccggtgccgactacgtgctggggcgcttcagcaaggccgaacgcgaggaactggcgatcgaggtggacgacggcgcggaagccgtcatctccttgatcaacgccgggctgggtcccacccagaaccggttcaacaactgatccgaggcgcccgggacgcccgcagcgttgtttggtatctgcccgctcgctgtgctctgctggccccatggcacatgacggggcaatcgatggaatccacgaccggctgcgcatcgccctcaaggacgcgatgcgggccaggaaccgcacccggatgtccaccctgcgtgccgccctgtcggtgctcgacaacgccaccgccgtgggtgtcgacgtgatgccggccgccggcgcgattgaggcgtccgccaccggcctgggtgccgcggaggccggtcggcgcgtgctgagcgagcccgaacaacaggaactcatcctgcgcgaggccgatgaactcgccgtctctgcggccatgttcaccgatgccgagcaggccgccgcccagcgggccgaggccgacgccctgcgcggattggtcgaacaggtcgactgaggaccggacggccgccgagcggcgacgcccgtcgaccgggcaggggcgtttaccgcccccgggtacgcttgaccggtgatgctgcagggtctgatcgataccgtttgtaacgacccggctattgccgatgcgattgagcaggcgcgcgcaggtgtgccggctctcgacatcgcaggaccacccgccaccagggctttcatcacctcggggttggtgcgtcgtgccggacgtccattgctcgtggtcacctccacgttccgcgaggcggagtccctcgtggacgagctgagctcgctgctcggcgacgaggaggttgcctactacccggcctgggagacgcttccccacgagcggctgagccccaattcggacaccgtgggccaccgcctcgaggtgctgcgtcgcattgccggcaaggacgacctgcctgcgccctcggtcgtggtggctccgatccgttcggtgctgcaaccccaggtgcgcggcctggccgaccttccggtggtgaagctgcgcaccgccgaggactatgacccctcccggctcgaggccgacctggtggccgccgcctactcgcgggtcgacctggtcgagcgccgcggcgaattcgcggtgcgcggtggcatcgtcgacatcttcgcccccacctacagccatccggtgcgcgtcgacttcttcggcgacaccatcgaggacctgcgcttcttcaccgtcggcgaccagcgctccaccgacgagaccgtcgacgaattcgttgccgccccttgtcgtgagctgctcatcactcccgaggtgcaacagcgcgcggccgccctcgtcgacgcccaccccgaactgtccgagatgctggagaagatctcgcagggccagtcggtggagggcatggaggccctcatcccggcgcttgccgacggcgtggagctgctcgtcgacgtgatggcccccgaaaccctcaccctggtctgcgacccggagctggtgcgcacccgcgccgccgacctggtgcgcaccagccaggagttcctgcacgcctcgtgggcggctgctgccgcgggcggcaaggcccccatcgacctggccgcgtcgtcgtaccaggagctggccgatgtgcgccagcacagcctcgacatcggccagggctggtggagcctgtcggccttcgccgcggcacccgacagtgccccgcagggcgaggaccccaccggagaatccgcatccgcgggcgaatccgtctcggccgccgacgcggcgttcgccggggggatccccgagatgatcctcgacatggagccgctgcccggctggcgcggcgacgccgagaaggccatcgccaccatgaccgatgatctggcccgcggttggcgcgtggtgtccagcgtcgagggcaagggactggccaaccgcatggccgagatgctgcgcgaccatgacacgcccgcccgcgtgctcgacgaactgcccgatgagcccgagccccatgtggtgtccatcatcctgtcgggactgcgccacggcttccgcgcccccgacctcaagctcaccctggtggccgccggcgacatcaccaaccagcccaacgcagaccgctcgtcgcgcaagatgcccaccaagcgccgcaaccaggtggtgcccctggagctgaagcccggcgaccccctggtgcacgagcagcacggtgtcggacgcttcgtggagatgacccagcgcacggtggcaggggccacccgtgagtacatggtgatcgaatatgcggcgtccaagcgcgggcagcccggcgatcgcctctatgtgccgatggaccagctcgaccaggtgacccgctacgtgggtggtgaggcaccggcgctcgacaagatgggcggcgccgagtggaagcaccgcaagagccgcgcccgcaaggccgtacgccaggtggctgccggcctgatcaagctgtacgcggcccgccaggcctcgcgcggacatgccttcagccccgacaccccctggcaacacgagatggaggacgccttccgctacgaggagacccccgaccagctcgcctgcatcaccgacgtgaagcacgacatggagcagatcgtgccgatggaccggttgatctgtggtgacgtcggctacggcaagaccgagatcgccgtgcgtgccgccttcaaggccgtgcaggacggcaagcaggtggccgtgctggtgcccaccacgctgctggtgcagcagcactaccagaccttcgccgagcgctactcgggctttcccgtgacggtggcccagctgagccgcttccagaccgagaaggaggtggccaccaccctggaggagatggcgcagggcaaggtcgacgtggtgatcggcacccatcggctgttgtcgtccaaggtgcactacaaggacctcggcctggtgatcatcgacgaggaacagcgtttcggtgtggagcacaaggaggcgctgaagaagctgcgcgtcaacgtcgatgtgctctcgatgagtgccacccccatcccgcgcaccctggagatggcggtgaccggtatccgcgagatgagcaccatcaccacgccaccggaggaacgtcaccccgtgctcaccttcgccggcccctatgacgagggccaggtggtggccgcgatccgtcgcgagatggcacgtgagggccaggtgttcctggtgcacaaccgggtggccagcatcgatcgggtggccgcccgcatccgcgagatggtgccggaggcccgcgtggtcaccgcccatgggcagatgagcgagaagaccctggagaaggtgatggtcgacttctgggagcggcgcgccgacgtgctggtgtgcaccaccatcgtcgaggccggcctggacatccccaccgccaacaccctgatcgtggatcgtgccgaccacatgggcctgtcgcagatgcaccagctgcgcggccgggtgggacgcagccgcgagcgcggttacgcatacttcctgtaccccggtgaccgcacgctcaccaccacggcgcatgaccggctcgccgcgctggccgccaacaacgagttgggcgccggcatggcgattgccatgaaggacctggagatccgtggcgccggcaacctgctgggcgatgagcagtccggccacatcgccgacgtcggcttcgacctctatctgcgcctggtgggggaggccgtcgccgagttcaagggcgatggcccgggcgaggaggagaagccgatgcgcatcgagctgcccgtcaacgcccacctgcccgaggactatgtggaatcggagcggttgcgcctggagatgtacaagcgcatcgccgaggtcaccagcaccgacgacatcgaggcgctgcgcggcgagctgcaggaccgctacggccccgtgcccgagcaggccgaatcgttgctgacggtggcggccttcaggctgctgtgccgtcaggcaggactcaccgaggtgatgagccagggccgatccatcaggtttgcgccgattgccggacgccgggcccccgacggcaccgaactgtcgctgcccgactcgcgccgggtgcgcctcgaccggctctacccgggcaccctggtgaagaacgccgccaacctggccctggtgcccgcaccgcgcaccgccaaggtcggtggccagcccatcatcggcgacgagttgatcgcctgggcctccgggttcgtgcgcgacatcctgctgcccgatgcccccaggcggtagggcaccgccggcaacactgcaggtgacacggtgggggcaaccgccggtgccgccgcgggctaggcccccggctgcactaagctcatcgccagatgcgctgcccggctctcgcgccgtccagccccgcggtggcgcacgcctgtgcggtctcgcggccgctccgtcccgtcgaaggagttactcgatgtccaggcgttcgctgctcgtcaggattggtgtgcccgccgcggcgcttgccatgttcgccggctgctcacccagccccgcaacggccatcgagctggacggtgcccgggtcagcgagtcgaccatcacccgttacgccgacggttgctcgaagatgctggacgccgggggcggcgccggccagtacacgcccggggacatccgccgcgtggtggtctcctatgtgggcgagggcatgatcgccgatcagctggcgcgcgagtacggcgtgacgctgtcggattccgacatggaccaggccaagcaggccctgggcaatgcgcggggcctgttggccgacaatgactgcgcccaggcggttgacggacagctgcgcctgacggccctggtgctgtcggccaagggcaagaacgtgcagaaggacgccgcctcgctggcccccgtggtgaacccgcgctacggcgcgtggagccccaccgactttgccgtggccggtaccggatcactgtcgaagctgagcaccgaccgctgatgaaccagcgccccgacgatgtgggctcgttgcccgcggcggcccaacgggccggcgaggaattcgcccggctcgtggcagtgaaccagacgctgcgcatcgaatgcccctgggacgccaggcagacccatctcagcctggtgaagcacctcatcgaggagacggccgaggtggtggacgccatcgaggtcggcacggccgatgaccagcgcgaggagctcggcgacctgctgatgcaggtggtcttccacgcgtccatcgcctctgacgagggcgaatacgacatcgccgaggtggtgcgcggcatcaccgacaagctcattgcccgccatccctatgtctatggcgacgccgaggtgcccgatgacctcgacgccagctgggaacgacgcaagaaggccgccaagcatcgcgattcgtcgttggacggcatcgccgacgccctgcccacgctggcgcgggcggccaaggtggcccagcgggtgcacgacgtgggtcccgacatggggccggcccaggatgaggacctttcgatcagtgatcgtgaggccggcgagaagattctcagcctcgtgcgccgggcccaacgcgtcggagtggacgcggaccaggccacgcgcgcggcattgcgccgctgggaggccgaaatcagggccgccgaacagtcctgagggggcatgaagccgtcacggcgggtggttcccgtcaggcgctttgtggcggcggacccattaggctggacagggggctcaacgccttcccaaaaacactgaaaggcagcacctgtggcaagtatcgaattcatcgaggcccgcgaaattcttgattcgcgcggcaaccccaccgtcgaggttgaggtcgttctggatgacggctcgtcggcccgtgcaggcgtcccgtcgggtgcgtcaaccggccagttcgaggccgttgagctgcgcgacggcgacgagaaccgctacggcggtaagggcgtgcagaaggccgtcggcaatgtggtcgagaccattggcgaggaagtcctcggcatggaggccagcaggcagcgtgagctcgacgaggcgatgatcgagctggacggcaccgacaacaaggccaagctcggcgcgaacgccatcctgggcgtctcgctggccgcggccaaggcatcggcggagtcggccgagctgcagctctaccagtacatcggcggcccgaccgccaatgagctgcccgtccccatgatgaacatcctcaatggtggcgcccacgccgactccaacgtcgacatccaggagttcatgatcgctccgatcggcgcgaagtccttcgccgaggccatgcgcatcggcgccgaggtctaccacacgctcaagggcgtgctcaaggagcgcgggctgggcacaggcctgggcgacgagggtggcttcgcccccaacctcgacaacaaccgtgaggcgctcgacctcatcgaggacgccatcaaggccgccggttacaagcccggcaaggacgtcgcactggcgctcgacctggccgcctcggagttctacaccgatggccgctacgagttcgagggcaagtcgcgcagcaccgccgagatgatcgagtacctcgagaagctcgtcaatgactacccgctggtttccatcgaggatcccctcgacgaggaggactgggacggctggtcgacgctcaccgagcgcatcggcgacaaggtgcagatcgtcggcgacgacctgttcgtcaccaatgtcgagcgcctgcagaagggcatcaccgagaaggcggccaacgcgctgctggtgaaggtgaaccagatcggcaccctcaccgagaccatcgacgcagtgaccctggcgcatcgcaatggcttccacaccatgatgagccaccgctccggcgagaccgaggacaccacgatcgccgacctggccgtggcccttggctgtggccagatcaagtcgggtgcaccggcccgcggcgagcgcgttgccaagtacaaccagctcatccgcatcgaggaggacctcgacgaggccgccacctacgcgggtgccggggctttcccgaagttcgactccaccaagtggtgatgatggacgcacggtgccgggtggacgcccagcactgaacgacccgcacaggggcgctgccggccgcaaggccggtggcgccccctgttgcatctcctcggtggcatatccggggtggcatgtccccgtggcgtgcccgagcgccatgccagggggcgccatctaaggcgtgacatgtccacccgcgtcgcgtccgcgcgggtccgcgccctgtgaattcaacggcgtcgggcgttgccggatgccgcccgggccggtgtcgggggacaatggggacatggtctcgtcccgttccagccggcgccgcagtgcgctcccctcggcgggcgacacccccagcacccgcaccgcagcgcgcacctcgcgtcgcagctcgcatgaacgcgcccgcctggagacccagacgagctcgggtgccgagggcgacgagtcgggcaacgaggcaaccggcccggtcgcccgcaccggcgcccgcatgacccggcggttggccgccgtcctggcgatcgtggcggtgctgatcatctcgctgatcaccagcctgcgggtctacgtcgaccagcgccagcagatatcccaggccagggcggccatcgcgtccagccaggagcacatcagccagcttgacaacgagcagcagcgctggaacgacccggactatgtgcgggcccaggcgcgcagcaggctcggctgggtgatgcccggcgagaccggctaccaggtggtggatgccaacggcgacccctacggcggcggggccaagatcgaccgcaccggcgtcggggcacagcaggcagaggcgtggtggcagcgcgcatgggacagcaacaagagcgctgacaagcccaccgagacgccgacgccgagtcggatcgaacgggtcgtgggacccagcgccgcgccaaccagcggaggctgaccggcccaccgccgcgtcgcggacccgaggcgagctccgtccggcgcatgccgtttttcggtcgtgccacaattggagaatgcgccaaatcgagcccctcagtcccgctgacgagcagattgtcgccgagcaactcggccgcgagccacgggccgtcgtgggggtcgcctggcgatgcccctgcggacgtcccggcgtgatcgccaccgaaccgcggctgcccaacggctctccgttccccaccacctattacctcacctgcccgcgcgccgtggcggcgtgctcacggctggaggccaacggcgtgatggccgagatgacgcggcgccttgagaacgatccggagctggccgagcgctaccgggcggcccacgagtcctatctggccgatcgtgccgcgctgggcgaggtgcccgagctggacggcatcagcgccggcggtatgcccacccgcgtgaagtgcctgcacgcgctgctcggccatgcgctggcggtagggccgggcgtcaacccgctcggtgacgagacggtgcgcgccgtgggtgagttctggaagcactcctgcgtcccacgcccggaggggagcaagcgatgagggtcgcggcgatcgactgcggaacgaacacgatgaggttgttcgtggcaagcctcaaccccgatggatcgctgcacgaatacgaccgcaggctgttgttcgtggggttgggtcagggcgtcgacgccaccggcctgttcgcccccgacgccctcaaccgcgcgttcgatgcctgcgagcagttcaacgagatcattgccgacctcgactgcgagcggggacgcttcgtggccacctcggccacccgcgacgcccagaaccgcgacgagctgttccgcggggtgcgcgcccggctgggcatcaacgccgaggtggtgtcggggcaggaagaggcgcacctgagtttccggggggccctgtcgggcatccggtccaaggccgacccggtgttggtgatggactccggtgggggatccaccgagctggtgcgcggcgtcggcgcgggcgcggacctggcccacatcgacgcgtcggtgagcctcaacatcggttcccggcgactgcgcgagcgcatcctgcgctctgacccgcccacggccgacgagatcgcccgtgcccggcagttggtgcgctccgagctcgactcgagcggggtggagctgtccgacatccgcaccttcatcggcgtggccggcaccgtgaccaccatgtccgcccttgcacagcacctgcgccgctacgaccgctcgcgcgtgcacggctcggtgttgagccaggcagcggtgcacgaggtggctgatcggctgctgggtgccaccgtgtccgaggtggtcagctgggggcccgtgcagccgcagcgtgccgaggtgttgtgcgccggggccctgatcgtcgaggaggtcgcctcccgcgtgggggcacccgaactcgtggtgagcgagtccgacatcctcgatggcatcgcgttgagcatgctggtggacggcaagggacaggcgatcagcgccgactagcgcacgggcctgggccgtcttggtgggcaggtccggtgaatcgccggttggccctggttgtcccggttcgtgtcgcgcgtgtgggtgccgccgattagtctgttgccgggcccccgtagcccaacggcagaggcaggcggcttaaacccgctccagtgcgggttcgaatcccgctgggggcacgaccccgctacatgtgaggccagcgctggtcttggaccggagatggcactcgctgaggcggccgatgggtccctggatctggatatgcaaggaaccgtgttcgcgtgggggtgtcaggtctggcgccagcctgcgagcagggcgttgagaccgtggtcatactgggcgtccggatcgtaagtccagccgttgttcagcagggcgctcagatgtgggtgggtctggggagacagggcctggtaattggctggggctgactctgctccgaccggctcgccgacctctgcgaggacttggccgatcgtgtagttgaccagggtgctcagcagatcggccgtatcagcgtctgcaggcatgcccgcctcggtgagaaagccgagcagttgctctatgacggttaggagctcggggctggttacgggccgggtgccgacgagggcgaccgcgttcgggtgcgcccgcaggactccacgcaaggcgcgcatggcggcgatgagttgctgctgccagctttcgtccgggctcgggacgcccaggtcgagcgatgaccagatcgtctcggcaatgccgtcgaacagggcggccttgttcggcacatagtggtaaatggccatcggatctacgccaagctcggtgcccagccggcgcatggtgagtttgtcggaaccgtcacggtccacgatgtgcaatgcagtgtgaaggatgtagtcccgggacagggtcgggcgcatgggacgcccactcgtactcatgtggtgcctactttcacggcattggagcggaagctgacggcggcaatcagtgcgaacccggcggtaaaggcgagcgtgccgattatcgcgggcatcacgtcagtcaggtgtgcgctgtccagggtgaggcggcgcagggcgtccaacacccagaaggcggggctgacgtgggccagcgattgcacccagccggggaacgacgcgacaggtgccagggcgccgcccaggccggccaggagcatgcccacgagcattccgaccgtatcggcctgatccatggtgcgaaacagcgcgacaagcatcacgccaaaggcgacgagcatggcggtgaacacgatcacgacgataccgatcgcgagcaccgagccgttgggacggtaaccgaagatgagcgcacccacggcgaagacgatggcagtctgagcgagctgaatcaggaagcggacaacaactttgcctgtcacgatgtcggcagtggacgccgcgctggcgcgcagccggtcccatgttccccacgcatgttcgcggaagaacaaggtggtgacctgctcaacggacaggaacgcgcacaatatggcgagcccaggcaccgtctgctcggcaccgctggcgttcggatatccggacaggatcagctgtgccttcgcgctggggttcagcagcggcacgaggatgagcggcaggagggtcatgattactgacgacccaggatcgcgcagctgcagcctccaggtagttctggcaatcgacatgctaggcagcaacgacatcgctggcctccttttccgcaagcgcatggtcgcccgtgatcgccagatacgccgcctcgaggctgggacgggtgatgcgtacatcgtccagaccgcccgcagcagccccgagcgtgctcaatgtctggccgagcatctgaccgggatcgctgaccggccggattggaaccagtccgccgcggtcttccttccacccgtccacttccggtgtcttgccccggaaatgaaggaatatcgatgatgaggcccactgcccggtgacttcctggacactgccggtcaccgtgatcctgccgttgacgagcacgttgatggttgcatccaactgctcaagctcagcggggtagtgcgtcgtatagatcacggcggtgccctcattcgccatatgtgtgacgatgctgagcagcacctcgcgtgattgcacatccgagccgactgtcggctcgtccaggaacaagacgtccgggtgacccagaagcgccatcccggtatgcagacgccgctgttggccaccgctgaggtgacctgcgggccggtcgagcagatcctgcagacccatcaaccgcgcgatctcagcagtccgggaacgggccttccgaccggagtaaccagccagccccgcaaagcaatccaggttctcctgcaccgtcagggtcgggtagatgcccaacgcctgtggggcgaccccgatatgccgggcggcctggcggcggtgacgaagcagatccacgcccccaatgtgcacgtcgccggcatccggccgcgtcagtccggcaaggatcgaaatcagtgtcgtcttgcccgccccattcacccccatgaggccaagaatttgccctcgctcgaccgacagatcgacgccgcggagaaccttgaggttcccatacaacttgatgattcccttggctaccaacattcgtgctccatccgtcgtaactctacgacgtagagcaggtctactacgtagaatcccgaggggaaactcgaggggtgctggggtggggatggggtggtgatttcattgatggcgcccggctactttctgtcggatatgtcggcccgctcagtgggcgtcctgcggggcacgcttcggcagcaggggagcggcgatgaggcagacggcggtgatggcaccgaccacgacgagtgaggcgatgaagggtcggttggcgtcggcggctgccgaggtctggaagtagatcgtggtgaccaccgccgagccgatggccgaggccagctgctgcaccgccgacagtgaacccgatgcgctaccggcgaggtccgtcgtgagatcgccgatcgcgacgtcgtagatgctgctgaacgacgcgcccatgcccaatccgagcacgaggatcgccggcgcgagcatccactggttggtggcgtctcccgccgcaatgctgatggcgatgagggcgacgatcccggccagggtggtggccaggccggccaccacgaggttgcgtcccagcttcgggatgagcgggcgtgccacgaaggaggcgatgatgatgcccaccatcatcggcatcatggccagcgcggcacccaccgggctgagccccaggtgcatctggaagtagagcgagaccacataggcgaagccgttgaccaccgcgaagtagcccagcccgatgagcaacccggacgtgaagccacggttgtggaacagcgccggcacgatgaggggattcgtcgcgaggcgttggcgcagggcgaagccgatgaacccggcgacacccaggcccaggcagatcacgggaaccgcagtccacccgttggtcgagccctggatgagtccgaacaggacgccgagcatgcccactgccaacagtgccgagccgagtccgtcgatggacaccttctgcaggtcgcgatccgggggcaacagcttccatccggcgatgagcccggccgcgcacagcacgatgttgatgaggaacatgggccgccacgtcaggccaccgatattggcgccgacgaggaatcccgccaggatcgggccgacgatcgaggccccaccgagcacggggccgaacatcgaggcagccgtggggaactgctcacgggagaaggtggcgatgaggatgccgatgccctgcgggatgagcagggcgccgaaggccccctggagcagccgggcggcaatgaggaacgcgggatcgatggccaccgcgcacaacaccgaggcgaccccgaatccggcgatgccgatgaggaacagccgccggcgcccgaagcggtcgccgagtcgcccgcccaccacgagcaggatgcccagcgcgagcgcatagctggccccgagccacttgatgaggccctccccgccgccgatctcgcgctggatcgtcggggctgcgatgttcatgatcgtggaatccatcaggtcgatggcgtccgcgatgaggacgaccgcgaggatcgcccagaggcgcctgccgagccgcgagctcgtggtgggctcgacggcggtcaatgtctgtgtcatgacgtacttcctttcgcagcgacagcatatgcgcagccattgcaaaagtgtaatcactacataaatggaggagctacacaaacgtgatctgtacactgaggccatgagtcagacagcggaacgccagggacgtcgcgaacgcaagaaggccgccacctcgtcggcgctcaccgccgccgcgcgcaggctggtgctcgcgcgcggctatgaggctgtcaccgttgtcgacatcgccgaggaagccgataccgcagtgacaacgctgttcaaacacttcccagacggcaagaacgccgtgatcttcggtgacaacgtcgactctgccgacgagaggatgcagtcgatcattaccgccgtcgaatcgcgggccgacgggcagagcgtgctggacgccctgcaccagttcttccgtgaccgcggtgccttctcgggcacgcaatcggccttcgtgcgccgggtggtcgaggctccgccgctgcgcgcctacgccaaggaacggtgggagcgctgcgagcccgggctcaccaccctgctggccgggatcgtggggcgaccggaggacgccgtgatccgcgccctggcccgcatcgtgctccagatccccgatctcgcggccacggacatggacgcctcacgggccgatcttgacgccatcatggctcgcctggaggcaggttggtcggagttcgcgcagagggcctgaggcgagcagacaccaggaacagctggtgggtgtcggcagcgtcatcgacggcacacggccttccccgatgattagaggcgcgaggtggaatctttcacgcgatcagaagctccagggcacatgcgcgggactatcctgaaaacggcgatgggacccgccggggcataagagcccgaaccgcagacctgctgatagttcctgttcgttgaatcaagggatggacatgggcatcccgcatcgagcaggcacgcgatgcgcatggccgtccgcgagcacgcgggagggcactcatgccacgtcaaacaatcaccacgctggacgcgatggaaatcttggactcgcgcagccgacccaccctgatggtcaggttgtccctgtccgacggcacacgcgcacgggcgatggtcccctccggtgcctccactggcacacacgaggccgtggaactgcgcgatcacgatccacatcgcttcggcggactcggcgttctcgccgcagtggaccacgtcacccatgaaattgccgacgccattgttgggcgccgcttcgagtccgtcggcgaactcgacgagagccttctggccctggatggaaccccgaacaagtcccggctcggcgccaacgcaatcctgggggtatccatggccttcaccagggcgcttgcggccagcggcggcaacgagctgttcgaatatctcccgggaatcggaggccagccgccccgcctgccggtgccctgtttcaatgtgctcaatgggggcgtccatgcggctaatccgctcgacttccaggagttcatgatctgcccgaccgggatggactccatgacggacgcggtgcgcgcaggctctgagatctactccgccctgcgtgcccgcctcaaggactctggccaacccgttgggctgggcgacgagggtgggttcgcgcccgatttcgccgagcccgagcaggcgctcgacacaatcgtggctgcgatcggtgacgctggctatacccccggcctcgagggcgtggccatcgccattgatccggcgtcctcggagttccgtcaggctgatggccgctatctggtcaatgggcgcagcttcaccagtgcgcagatgatcgagcgctaccaggccatcgtccacgggtacccggtctggctgcttgaggacggtttggctgaagacgactgggatggctggcagcagctcacccgcgaactcggctcccgggtggagctggttggcgacgacatcttctgcaccaaccccgagctcatccgcaagggcatcgagcgtcatgtggccaatgcgtcgctgatcaagctgaaccagatcggcacggtcaccgagaccctcgacgccatgaacatctgcgccgctgccggttatcggcagttcatgtcgcaccgctcgggggagacgcccgacgcctttatcgccgacctggcggtcgccaccgggtgcgggcacatcaagtcaggcgcaccggcacgcggcgagcgcgtggccaaatacaaccggctgctggagattgccgccgaccaccccgagcttgcctacgggcttggctgaggtgctggtcacctggtgacgacgcccgtcgggccaacgatggcgtggacatcccgttcagatcacttcgggcgggatgtcctcgggatgcttcagctccgtgcgtccaacacgcttgttgataaccaccgtgaccgcccacagagccacgccgatcacgatgagcaccccggcgatctgatactggccaatcggacgccccgacaccggtagcacgaggaataggcacaggaggcaggccacgatcgcgacgatccggctggtgcgaaaatgcttgtgccccacccggtcgcgcttcaagaccaccactgccaggttcaccacggcgaagacggccaacagcagcagtgaggtggtgccgccgagcaggccgaccactgcgctgccgcgcgccaggctcacatacaggatcagcccggcggcgatcgcggtggtgaacaatacggcggtccatggcgtgcgccgcaccggcaagacgcgcgccagcacgcccggcaacacatcctgctgggccatgccatagatgaggcgacttgccatgagcatattgatgagcgctgagttggccaccgcgaacatggagatccagggcagcagctggttgatcgggaatccgggtgccgcgttttccaccacgagaaccagcggcgcctcgctcgcggcaagattgcccaccggcaccagggcaaccgagatgatggcgatcaccacatagatcacaccggtgacggtcagcccgctgagcaggatgcgggggaagatgcgcgtcggttccttggtctcctcggccatgttcacggcatcctcgaaaccgaccatcgcgaagaacgccagcgacgttgaggccgtcaccgccacgaacgtattgcgttccgagctggtctggaaggccaccacctggctccagtcggcccgaccctgggtgatcgcccacaggccgatgaagatcaccagcagcagccctgacacctcgatgagcgtgagcaccacattggccttgacgccctcggccaccccgcgcaggttgatcagcatcaccaggaaaatgaagcccagcgccaccaccagcagccacgggttgttgtcggccggctcggagccggtgagcccgcgcaccatgttcacggcgaacgcccgggatgccgtgctggccgaggtgatgcccgaacacatgacggtgaacatcaccatgaaggtgatgaagtgcaccccgaacgccttgtgcacatacagggccgcgccggccgcctgcgggtacttggtgaccagctccaggtatgacagtgccgtcatcatggcgatcacgaaggcgatcaggaacggcaaccaggccgcgcctcccacctcgccggccacctgcccggtcagggcgtagacgccggtccccaggatgtcgcccaccacgaacaacaacagcagtccgggccccatcacctgcttcagcgccggggacgccttgccgtcgtctgagggggctggcgggttcgcgtggggtgatgcagtgcgatctgacgtgttcatggctcagccctcctcgtacgtggaacgccgggaacccgacgcggacagatgggggtgtgcgtgcaacgagcaaacgctagtggcccggtggggcgcacgaaagagccgcgatccagttgttacatgcttgaaacgtgaagccgacgtccggggacgtcggcttcacgggtgttcttggtcggcagagccgggcagatgccggcccacaggcgccggcctattcgtagtcggtgaggcgcttcaggtcgtcgagtacgcgctgcggctcatcggacaggggcaggttctcggagtcgcccggcgcgtcggccgccgccggctcatcgggctgcagtgctgcgaacaggggcgtcaggtcggcctgctcctcgccggtggtgtcgagcaattcgaaggtcttgtgacgcgccgcgtcgttgctcagggcgtccaccagcacgcgggcgatctgctcgcgggccacgccgccattgctcgggtgctcgccctggcgcatcacgagcttgtgggcgtcgggggcgttgtagtcgaaggcggccggacgcacgatcgtgtactcgaggccgctggcgcgcagcagacgctccccgcggcgcttccagtcgcgtccgtggttctccttgttgtagatgctgtcgcgcttggtcatgccgatcgcggtcatcagggcgacccgcaccgaacgatcgcccagggcggtgagcaccgagcgcaccgcgccgtagtcgacggcctcggcctgctcctcggtgctgttcgaaccgtgggtgaacaccaccgcgtcggttccggcaagtgcccggtctagcgtggcggcgtcggtcaggtcgcccaccacggccagcgcaccctcgggcagggtcttcgccttgtcaaggttgcgcaccaacgctcgggtggcatagccctgcttgagggcctcggccaccacgaagcggccgacgcttcccgtggctccgacaaccaggatggtgtgcggtcgcttgctcattggttcctcccgatgcggtggggccggggtgggggagacccggtcgcttggcgtcacgtcctgcccggcccgggtacctggcggaccaatgtggccgaccatcgacgagcgcaggcaggcgcgtcgcaatgtccgggccggtgtgagtgccggcaacacgtaactcctgctagttttgcgcgtcggtgccttacgcggcaagggttttgcgtccacgagtcgataagcccagcgcgatcaccgggtgcccgcctcgcagcgcgacgcgaccgccatggccgtccgggggcgataatgacctgatgcggccctttgctgagctggttgccgaagcccagagtgccgatatcaccgggtggggattcggcttcctcgacggtcgcgccaccgaggagcgtccgccctggggatatgcacgcctgctggcgggccgactggcccgagcacacgccgcgctggacatcgacaccggcgggggagaggtggtcaacgaggccccgcagctgccaccgacgatggtggtcaccgaatcctggccgccgaatgcggagcgcgcccggaagctgctggggccccgcggcgtcagggtcgtgcagaccaccggggatgatccgttgcccttcgacgacgccagcttcgacctggtgacctcccgccatccggtgaagccggactggcgcgacatcgcgcgggtgctggaacccggcggccactacttcgcccagcacgtggggccggcctcgtcgttcgagctcatcgagtatttcctcggcccgctgccggagaaccggaagcgccgcgacccgcatgtcgaagcggcacaggcgcaggccgccggactccacatcgagtccctgctcaccgcgaccctgcgcatcgagtacttcgacatcggggccatcgtctggatcctgcgcaagtgcccctggtgggtgcctgacttctcgccggacaagtatcacgaccaactggtgtgcctcgacgcgcaactacgcgccggaaggtccttcgtcgaccactcctcgcgacacctgatcgacgcccggcgctgatcaccggatgacggcgaaatcagggacagttgggtgtgagccgggccggctcatcattggccgccgaagggccactgggtagccttggtgggatcgacccggccctgtcgggcccatttctcagatcggagcacaggtgcgaagcagcaacccagtactgaccaggccggacgtcttcgtccccgctggccaagcgggtcagcagtacgtcgacgcggcgtatcaggaggcgtcctatccgcccggcggatacccgggcccgtcgcggcccgcggcccgcatgacgatgaacgatgtgatcgccaagaccgccacgctgttcgtgatcctcgtggcagtggccgcggccgcctggatgttcaccgccgtcaacccggcgatggccctgcccctggctctcgggtcatcggtgatcgccctggtcgccgccatcctggtgaccgtgcgtcgcagcacctcggtgcccgcgatcatggcctacaccgtgttcgagggcatcctcatcggggcattcagccaggtgatggagagcatctaccccggcatcgtgggccaggccgtgctgggcaccttcgctgccgcggccgtcacgctgttcgcctaccgcaccttcggcgcccgcatcagcggccgcatgcagaagatcttcatcttctcgatcatcggctacgcggtggtggccggcatcaacctgatcgccctgctgttcggggtgaatctgggcttcttcaacatcggtgccggcgcgggtgccctcagctggctgttcgccgccatcggcgtggtgctggccgtggcgagcctgctcatggacttcgaggaatgcgaacggggcgtccgcatgggcgcgccggccaaggaatcgtggcgggccggattcggcctgatggtcaccatggtgtggctgtacaccaacctgttgcgcatcctgagcttcttccgtaactgatcacgcgccgaccccccacggtcctcgcggactgcatgcccacctgcttgctgcacatcccgccgatcccgacaggggacggcgggatgcgagcgttcggggacgcgtgcgttgcgggaaaccggcgcagggtgatgcgccgcgacgcgcgagcagcggcgtcggcgtggccgatcagcgcgcgaacaggccgctgagttcgtccacgtgtcggtcgagggcggagcgggcactggacgtccagggcagcgaacgccagccccgcagcgacacccagtgcgatgcctcagtggtgccgcccacgtcgagcacctcgggctcggtgggggccgtgcagaccgccgtatagatgatgcggatggcctggaagtcctccagccgaccgttcggggcgcgtcccacccagtggtcggactgcaggtcgacaaggcgacgcagcgccaccgactggtcggtctcctcgcgcacctcgcggatcaccgcctggcttgacgtctcggaggcctccagaccccctccgggcagctgccaacgtccgggcacggctgtgcgatcgctgcagatcgtgccgagcaacccgcgatgtgagcgcacgatcgcgtaggcggcaacgcgctgacgcttggtgggcacttctccgggcgccaccaccaggtcgggatcctgccggtgcccgcggcgacggggcgtgcgtgaagtggccgtgcgctgtcgcacctgcgccgtgaccacgagctcctcgtccgctccggtggcggacagccagcgcgagacgacccagccgcgatgccacagcaacacacggggatcctcgccatgccccacgggtaggcgaacaacaggcgccttgtccacccgctggaccccgataacgtgcatcccaccattgtcccaccggccccaaaacgtccgcggacgccggcgcggctacttcgcgatgacgtcgccggccatggtggtgaccacctcggccccgctgaactggaagtacatgaagggcacccgctgtccggcgtgctgtgcgatggtcaccgtcacactggtcgacggggtgcgtcccacggttgcgggcagtgtctgctcgagccgggcgatcagccccgggtcgatcagcgcgggatcgaaggtgcccgggtcggaggaatccttgatgttcgaggtgatgctcggcagggcccgctggcgggtgcgacgctggatcgtggccgcgtcggtgcgcacatcggcagacagcgaatcgggcttgatcaccacctgttccacccgcgacgccccctggacggtgtccgagaggccctcacgcatgccatcagcggtgctgaagtcgagcttgttcacgatgctgccatcgggacggaagaagaccgtgctggtctcgggggtggtggtgaccgtcatcagcaccacgccctggttgtactcgttgatctggaggtcctgctgctggcgggaaccggagatctcgccggccttctcgaacagctccccgacattgtcgatattgaatcccgacggcttgaactgagcctggttgatgtacttcaccgtcgaatccacggggctgatgtggccgttggcgtagccgatggtgtgggcctggtcgtcctccaggtaggtgatgttggcggcggtgggggtcacctcgacccgcagcaccggcttgttgcccgacgccgccaccaggaagtcgatcacctggcgtgcatggcccgccaccgtgaggtcgaaggccggcgcctgggtcgactgcgcgttggcgggagtggtggccgatgaagaggcctgcccagcctggggtgcaccgcaggccgtcaccgcgaacaccagggcaacgggtgcgcccagcgcgcgcaggtatcccctcaccgtgtgcgacatggccaccaccgtacgcgtttcgtcggcgtggcgtcatggcctgcacaccgcttcgacgcactcatcggcgggcgcggccggggttgccgcggcgccggcgcgacggggatcacggcttcgctgcaccgcgcaataccgcgtgcgggggaggtttccccgtgggcagaaggccgggggcaggcgccggtggctgtgtcagactgggcgcgtgatcgatttcaatcgacgtgccgacgcggtggcgccatatctgctcggagcaatcatccgtcggggcaaggtggccatccggctgaccgaggtggaggcctacctgggtcccaaggatccggcgtcgcacgcagtgagcgggccctcgggcagggccgcggtgatgttcggtcccgcccgccacgtgtacgtctactccagctacggcatccacctgtcgggcaacatcgtgtgttcgcccgatggcaccgcctccggggtgctgatgcgggccggcgaggtggtcgagggcgtcgaccaggcgctgaccaaccgcggcttcatcgtggcggcgtcgcccgacgaggaccaggccgatgcacaggcccggcgtcccgaggcggaactggccaagggccccggcaacttcggggcggcgatcggcctgtcactggccgacaacggccagcccctgggcgggcccgacgacctgttcgagctccacgtgcccgacgcgctggcccccgagatctgggtggggccgcgggtgggcatcaccaaggcccgcgacgagccgctgcggttctggctgcccgacgaacccagcgtctcgtcccgcaagatcggttcgccgtggactccgcgtgagggtccatttacccttctctgaggccgtcggtaccgatagggtcatgacatggccggggtgatgatgcagcgaagcatcgcagccctgcgcaccagactgtccctggggcaggccggcccatttgaatccgagaagtgaatcgaggttcccatgtcggagcaggtcagtaccgaagatcccaagacatccgtcgtcgtcagccgcgtgatcgcccaacccatcgccaaggtctgggccgtgctgatgacgaaggacggtagcgaggcccttctgggtcgcggtgcggtcctcggggaaaagggacagacgtggacggcggccgatgggcgcaccggcgtcgtccgcagcgtccatcgtggcgaacagatccgcttctggtggagaaagagcgaggagcttccgccgtcgctggtcgacctgacgctggctcccacagatgacgatcacaccctggtgaaggtggcgcactcccacctgcgccccgacctggacccggcatacctgcagggctggtgggaggcgtcactggaacgcatcgagagcgacgccttctgatccggcaccactgatcaggcccgcaacgggcccgtcctcctaatggagggcgggtccgtttgccgtccgggggtcgggcgcctgcccgtggggcgccgcatcgcgcggctccgccgacgtctaggctcgaaccatgaaatacgtcaagggcaccctcatgatcctgggcggagtgttcttcgtcgccgccgtggccattttcatcaaggtctatttcttcgacctcaaggccctgtggtcactggccgccacgaatacgagcatcgcctacagcgatccgcgtccttggttcatcgtgacctcggtgggcctgctgctgggcggattgctgttcgggatcgggttggcgctcaccaggacgaccttcgccacccgttactcccgcacgcgcaaggaggagaagcgcgaggaggccgacaagtccggcatccacggcgcctccgccgccccgaagccggtggcagcgcccaagcgtcgcgccgggcaggtggccgacaaggcatccgggggccacaccggcaacgccccgcaggcgggcgacatcgtccccgacgagggcggtacgcccggcccgaccacgacacactgaacgtccggcgggctcgggacgcaggtcagcgcgtctcgaccagtccgcgcacatatcccagcgcgcccaggtgctgggtgatgtcattggccaccgagaccagtcgggtgccggccttcaccggcggattccagttcgtgtcgacgatgcggtcgaggtccttggcgcgttcctgctcgagcaccttggccgcccgggcggaggcggcatagaaatagccgagcagcaggtcgggatccgacacgttgaatgcggcgacctgctcattggtctggccgtatccgccgtcctcgggaggatagggcagggcgaacttctgctgccagccctgcccccacgcctgcgggatgtcggtcagcgcgtccagctcggagtcctcacagcgtgagatgtgccacaccagccacgccatcgggttggccttggggcccggacgccacagcaggtcatcgcccgacaagccgtcgagcagatggggcagggtgtcgctcacgcgcacgaagcagtcctgcatgaggtcaatggcgttcatatccggctcttttcgatcgacagggtggcgaagagatcgtccactccacgatagagccgtgcctgaagcccaaccgctgcggcggcgtccacattgcgttggctgtcgtcgatgaacaggatctcatcggcgggcaggtccagccggtcgatgcaccactggtaggccgcgggcgagggcttgacggcgtcgatgtggcaactcatggccaccacctcgaattcgtccatgaactcgtccaccgcatagacatgctcggccagcgaggtggggatattgctcagcagcgccagccggtatccggctgccctgaccctgggcagcgcgtcgatcatgtcctggtgacgcagcgaccagctgtcgatgtcggcggcatgcagttccatcagctgttccgtgccgaagtccatccgcaggtcgcaggccacccggctccagtagtccaggggcgtcgagatgccctggtcgtagtcggggcggtgcgcccagtaggcggcccagaaggcatcgggctcggcaccggcgatgcgcaccagccgcgtgcgggccgactccggctggatctgggcgatgacgccgaacatgtcggtgagcagggctttcacggtcatggccccattgtcgcgggttccaccgccgtcggcacgtccgctcccgcgtgcccggaggggcgggaaccgcccggatcggttgctcgcgggatgtgtcgtggacctcgcgccggccgggtgacgcgattgattagtctgacgttgcgccgacgccatgccggccggacaggagccgtgatggacaaccagatccaccgtcatcccgagcgggccgtcaccgatcgggcccggctcgaccagctgctcgacgagatcggcctggccacgctgtccacggtgagtcccgatggcgagccctgggcgattccgatcaatgtcgcccgcgccggcgatcgcgtcgtcatgcacggatccacgggtgcgggggcgttgcgccacgccgctgccggggctccgatcgtgttgaccatcgccaccgtcgatgccctggtggtgggtgccacggccttctccacctcggtgaactaccggtcggcgtcgctgcgcggcgtggccacccgcgtcaccggcgacgaacaggtcgccctgctcggggccctcaccgaggcattcctgccgggacgcatgggggaggtgcccgggctcacgcacaagcagctcgccgccaccatggtgctcgccctaccgatcacggccgacaactggatcatgaaggtgcgcgcgatgggccccgacgagatggtcgtcgatgccgacggcgggggagcgggcggctggggcggcatcgtgcccgtgcgcaccgtgctcgacgaggcacggccggcaccctgggcgcagggggcagtgcccgaatcggtgcgcctggcgcaggaacgccggcgctgaccccgccggggagctgcaccgcaggccagtcggtccgcgagctgccgtgctggaggctacgaggctggaggccgcggggctggaggctgcggggcgcgtcggcgtcagcgaccgggaaggcccctggctgcccgccattgcacggtcacgtggttcccggcggccagcggcgtggaagccggcaggacatgggtcaccgaaccgtcggcattgatggtggcggccttctgctggcccagcctcaccagccagctgccgccctcgggggccgcagtggtcaagtaattgttcgagccgatccagtcgatcagcccaccaaggtcgtgcacctggtgggggtccacgtcaaggcggcggtcatcctcggtctcgccgggcacggttgagcggtccaggtggatgagttccgtgtccccggcctcggcatcatcgaggtcgggatggctcgtcgggtgggccgtggcctgcgccacacccagtgcgacaacggtgagcagtgcgagcaggatcgccagggtgagcagcatcgggttggacccggacgtccacgcgagcacggtgagcaccgtggcgaaggcaagcaccgcggcagtccatcgcagcgtgcggggccggggtgctgagaagtgacgcatggtgccagtatcccaagtcgcccactgcccgatccgcgggcttgcctgcactcagcaggggagcgtcacggttgcatcgggcaaggggttggacggtcagcagtcggacggcagtgcgatcaggcggccgtgcacggaatgccggtggcgtgcaccgggcagtatccgtggggattcgcgtccaggtactgctggtggtagtcctcggcgaagtaccagggcccaccattgccgatctcggtggtcagctggccgtagcccgccgccgacatatcgcgctgatagctgtcgcgcacgcgctcggcgatggcctgctgctcgtcgtcggtggtgaacaacgccgagcggtactgcgtgccgacgtcgtttccctggcggtcgagctgggtggggtcgtggttctcgaagaagacgcgcaccaactgctcgtagctcgtctgcgtgggatcgaacaccacgcgcaccgtctcggcgtggccggtcagcccgctgcaggtctcttcgtaggtgggattcctggtgaagccacccatgtagcccgccgcagtggacaacacgccgggctgctgccagaacagcttctcgacgccccagaagcacccggccgccaagtaggcggtctgtgcaccggggaaggcgcgatcgagcgggtcaccgaagacgcggtggaagaagggcatccccagcacgggctggtcacggccgggaagggcgttctcggcggtcaacgtcacaggctcatcgaagcggaacaccccgccattttacgtggcagccggggttccggaccgctgcacgctgtgggcgcaatcgggtgtggagcccgccggttggcccccggcccggtcggcagaagggccgctgtgtcagcgctcgttcaggtcccagtcgatgggctgggcgccggccccgacgagtgccgcgttggcgcggctgaagggcctggacccgaagaacccggaacgggccgacagcgggctggggtgcggtgaggcgatgatcggcacgccgccggcctgcagcatcggcgtcaacgactgggcatcgcgtccccacaggatggcgaccagcggcccgccccgcgcgacgagcgcctcgatcgcggcctgggtgaccggctcccaacccttgccccggtgcgacgcgggatggcccggccgcaccgtgaggcacctgttgagcagcagtacgccctgatcgaaccagccggtcaggtcgccgtgtggtgccggcgggatccccaggtcggagctcagttcctggtagatgttcaccaggctgcgcggcagcgggcggacgtcgcgattcaccgcgaagctcaggccgatcggatgccccggcgtcggataggggtcctggccgacgatgagcacccgcacgtcggccatcggacggctgaaggcccgcagcaccttgtcgccatcgggaaggtatccccgcccggcggcgatctcgccgcgcaggaatttccccatggcgtggatctggggttcctggggagcaagcgcggcagcccaatcgggcgccatgagctgggcgatgggctgggcgttcacgcgttctcccgcagttggtgggcttggtcggcgcgcaacacattagccaccgccggtgcctgcgggcccctcatccaccacgccgcgtgccgcgtccggacactgcccgcgatgcggcacactggcaattacgtgcacgaccggggcaagggcgtgcacaggcagcttgaaggaggccccatgccggcattctcgctgggacggcgcatgatccggcgccccacccgaccgcagcatcctgacgaggccccgcacccctcgtcgggtcccgagccgctgaccggcgagcagctcagggaacttgaggacctgcgcgccgcaagcgtcgaatcgctggtgccgcgccccctgcgtaccgcggcggcctggggctggcggctgttgatcatcgccgccctgatcggcctcatgtggtggctgggcggcacgctgtccgagatcgtgacgccccttgccacggccctgttgctcaccgctgcgctcatgcccctcaacctgttcctgcgcaagcaccgctggccgcactggctggccgcgctcacctgcctgctgctgctggtggtgatcatcggcggcctgctgaccctggtcggcgcccagatcggcacccagtggaggcaactcggcgagcaggccggcaagggcgtgcaggcgttcatcacgtggctgggcaccgggccgctgcacatcagccaggaccagatgaacaactggctgtcgcaggcccgcacccacctcgagacccagcagaaccagatcgtgtcggtggccacggccgccgggtcgggcgtcggcaagttcttcgccggcctggcgatggccctgttcgcgaccttcttcttcctcaagaacggcggacactatgcccgcagcatcatcgggaccctgccgcgcgccaacaggatcgcggcccagggcccgctgaagagcggctggcatgcgttggtcaactacgtgcgtgccgccgtcgtcgtggcggcagtggatggtgtcggcgcgggcgtcggcgcactcatcctggggtcgaacctgtggatggccatcatggccctgaccttcgtctgcgccttcgtgccgctgatcggcgccttgttctccggcgccgtcgcggttgccgtgacgctggtgacgctcggcttctggaaggccgtcatcatgctggcggtgttcgtggccgtcctgcagctggaggcccacatcctgcagcccctgctgttgggccgcgccgtgcagatcccgcccctggtggtgctggtcggcatcgccgtcggcatgaccctgtcgggcgtggtgggcggcatcttcgccattcccatcgtcgccttcgccaccggcatcattcgtggcatccgccatcagggtgaggacctcgcggaactggcgcccggcagttccggagacgacccgccggagacgggcggaccctcccggctggccgaccagggagtcgacgggggagcgggccccaccgccgatccccttgccacggcccgcggtgcaagctcctcggggaccacctccccggctgccagtggcatggacgcgccaccaaccgtcgcagggacggatcccccatcgaccgcaggcgagggcggggtcgcccagccgtgacggacggaccgatccagccctgaacgggccaccaattcgcgggcggtccctgtggtgggcggcaggcggccaatatattgacgccatgagtgaatccaccgagctggacgcgatcctgaccgatctggtgaccggcgccatcggcaccgctgaggcggcccgccgcatcaaggccctggcaccggccccgtcgccgagccagcctccggaggaggccgcctacgaccacaccgaagccgtcgatgggacgcccgacgccggctcgcaccaggaggcccacgccgaacaggcgggcaaccgcagcgagccggcgcaggggccacgtgagccgtcgggcagccacggcgtcacggccgtgcaggtgcgggtcaccggacgccgcgtgcgggtgctcggcgaccagaccatcgccaccgtggccgtcgaggggccccactcgctgcgccgtcgcggcgacctgctcgaagtgatcagcgaggacgagccgaagtcgtcgtccagggggttcgggctcggcaggatcccgcgcagccgtgaggacctgcgtcggatcgggctgggggagccgctcatcgtgcgggtgaacccccagatcgaggtcagcgtcgaactcaccggaggcagcctcaacaccgccggcgtgccctatctcgacaccgtgcgggtgaccggcgggctcaccgagctgcgcgatgtcacgcgcgtgtccgacatgctcgtgcaggccggcggtgccagcatccatggcgatttccgcggcggccgcagcagggtgaaggtggagaccgggaacctgaacgtggccctcacccccaccgccaatgtgaccatcaccgcctcggcgcgcctgggtggcgtgagctggcccgacgacggtgccgggctcgacgaattcgtggccggcaatggcgcggggcgcctcgacctcaatgccttcgtcggacgcatctcggtgcgccgcgacgatggttcggcaaccagccccgacgcgggggccacccgggactccggcgcggggaagcagtggtgggaggtctggaaggactgagccactggatcccgatgtggcgcgtggcagatgatgacgtgacaggatgatgaggggccccggacaccatggtgtccggggcccctcatcatcgatcgcgtggttcagcgagggctcaggccttcttggccttcttcgccttcttggccttcttcgccttcttggccttcttcgcgccacccagcgcggtgacgagcagtccgccggtgagcgagaggttcttctcgaagtggatctgctggttcaccttgtcgccgccctcgtacttccagaaggggtggcccatgtaggtggtgggcaccatctgcgcggccagcaccagggatgccagccgaggagcgatgcccagggccagtgcgacgccggcggcggtcatcgtgccgccctgcagcttggtgagggtcactgcggacacatcgggcaggatgtcgcgcaccggcgcgggcaccttgtcgagcaggtcgtccgtgacgccggccatctgatcggcattctggaacacggcatagccgcgacgcacgaagacggtggcgaacagcgaacgcgctgcaaagtgggcaattcccatgacaaaactccttgttcggatgattgaagcgtgaaataaccgtgtcggtgtgagcctatggcaagcaccgggccacggaggtcagatcactttgcgaacgattcgaccttcatgatcttcaccgacacctcgcggccgttcggtgcctggtattcgacggtgtcgccggcgctcctgcccagcacggccgcgccgaggggcgactgcgggctgaacacctgggtgtccaccgacttgtccacgcccatcatctcgcggctgccgagcaggaagacgtcggtgtcatcggggtcgccgtcgtaggcgacggtcacggtgctgccggcggtcacctcgtcgggagcgccctgtggctcgccgacctcggcatgctgcagcatctgttcgagctggcggatccgcagttcctgctggccctgttcctcgcgggccgcgtggtagccgccgttctcggacagatcgccctcagccttggcggccccgatcttcttggcgatcagactgcgtccctcgcccttgaggtagtcaagctcctcctggagcttggtatacgcatcctgcgtcatccagatcgtctgcttgtcactcattgctccatcctatcgaggcggggcggccatggctgacgccgtcgcgtggcgaggtgggtgctgccggtgttgaggggctgtgcagactaggggcatgtcagtgcccaccagcgacccgtccaacgcgggtctgcgacttctccatgtgcatgcccatcccgacgacgagtcgagcaagggcgcggccaccaccctgaagtacgtccatgagggcgtgcgggtgatggtggccacatgtactggtggcgagcgcggcagtgtgctcaacccggcgatggaccgccccgaggtgtgggaccacatgcccgagatcaggcgttcggagatggcgcacgcccgcgagatcctcggtgtggagcagcgcagcctgggatacatcgactcggggttgcccgagggcgacccgcccgacccgctgccgccgggctccttcgccacgctcgacccggaggtggcagccgcgccgttggtgaagatcatccgcgaattcaagccgcaggtgatgaccacctatgacgagaacggcggctatccccaccccgaccacatccagtgccaccgcgtgtcggtggcggcgttccgccaggcggccgatcccgaggtgctgcccgagtacggcgagccctggcaggtgagcaagctgtactaccagatgagcttccaccggttgcgctatgcggccctcgacgccgcaatgcacgaacggggaatggattccccctattcggagcgcctcgccgagtgggagaaccgcgactacgagcagcgcatcaccacgcgggtgccctgtggggacttcttcgcccggcgcgacgacgccctgcgtgcccacgagtcccagatcgacccgcacggcttctggttcgccgtgccgctggacatccagcgcaaggtctggcccaccgaggacttccagctggtctacagccgcgtgcccaccttcgtgcctgagaacgacctgttcgacgggttgcgccccggcaccaaggcaccggacccgtccgatacgtggatcatctgactccctgcgggagtggatcatccgacgtcctgcggaagtggactgaccgatgatggggcgccggggggattggtgccccatcatccagaccgccaagaggattggcgcgcggctgtccagaccgcgaagaggattggcgcgcggctgtccagaccgcgaagaggattggcgccccttcatccagaccgccaataggattggcgtatggccaaccgtctcgtcgctgagagctcgccctatctccgagggcatgccgatgatctgatcgactggtggccctgggggccccgggcgctcgcagaggcccgccgtcgacaactgcccgtgctgctgtccgtcggatacgcctcctgccactggtgccatgtgatggcccaggagagcttccgtgatccgcaggtggcccagttcgtcaacgacaatttcgtggcgatcgcggtcgaccgcgaggagcgtcccgacgtcgaccaggtgttcatgaacgccacccaggcattgaccggccagggcggctggccgatgacggtgttctgcacgcccgatggagagcccttcttcgccggcacctatttcccttcgcaggcccgcgacggccaaccaagcttcctgcaggtctgccagacgcttgcccgggcatgggccgaacggcgcgacgaggtcgtcgaatccggtgcccatatcgcctcccaactcgccgaccaggcgtccgtcgccgacccggcgggggaccagaccggcgagcccccggccgccgatgaactgctggccggcgcgctggcgctcgtcgaccccgacaacggcggcttcggcaccgcccccaagttcccgcagccggccagcctggatgccctcatggtcaccggtgaaccgcaccagatcggggccgtgcagctgagcctggagcacatcgtgcgcggcggcatccacgacatcgtcggtggcggcttccaccgctatgcggtcgacgcggcatgggccgtcccgcacttcgagaagatgctcgacgacaacgccctgctgctgggcacgctcacccgggcctggcgacgtaccgggcccgagaccggcgacctgcgcgaacacttcgaactggcgatccgcggcatcgtcggatggctctcgcgcgagatggcgatcaccaccgatgccggcacggccttcgcctccggccaggacgccgattccctggacgccgacggccagcgggtcgagggggccttctacctgtggacgccccaccaggtggaggccgtgttcaaccggcgggacgcactgttcgcccaggcggtcttccacctgacgcccaagggcacgatgcctgaccacagctcgacgctgcgcctgcacggcgacccggaccccgaccggctcaagcggatccttggcgagctgcgcgaggtgcgcgccgagcgtcccgcccccgcccgcgacgacaaggtggtggccggctggaacgggctgctggccgactcgctcacctcggcggcgatggtcttcggtgaacccgagtggctcaccatggcacgctccgtgctcgactacctgtggagcgtgcaccacttcgacaccgaccacgcggcgcgcagctccctggccggcgtggcgggtcccgcacccgctgtgctggaggactacgccggcttcgcgctgggtgccgctcgccttgccggtgccaccggtgacaccgagctgctggaccgtgccgtgaccgtgctcggccgtggcgtcgagctgttcggcgccgacgacggcggattcttcgacgcccaacacgacgaggcactgttcacccgggcccggcaactggccgacgagggcggtccctcggccacgagcatcatggtcaccgccctgcaggtggtggccggcctcaccggcaatcgggactgggccgaccgcgcccgccgtgccgaacccggcctgtggcaggtgctcgagcagacgcccctggcgtcgggctgggggctgacgcaattggccatcgacgcgcaggcgaccgccggcatgggacgcgcccaggtggcgatcgtcgaccccgagtcgcggcccatgggcctgctggcccgcgcggtgtggcggttggcgcccgagggcaccgtcgcggccctcggcactcccgacgcgcccggcttcggggaactcttcgcgcagcgtcacgacatcgacggcgcccccaccgcctacatctgccgcgacgagacctgcttcgacccggtgaccgacttcacccgcctgcgcgaccccctgtggcgacgcgtcgtgcgggcaagcctgccggccgacggccgccggaagggcacacgccccgcccacgaccacggacccggcgatcgagcccacggcgcgccgggccatgaccacgggcccgccaccgacgggatgcgcgtgatgtcgcacgtcgccaccgacaagccgcgcttcgaatggcgcaccctgcggactgcggaattcgggttccccggagaccagcgcgatgccctggtggccgccgtcctcgacggcaccaagaccgccacgtcggagccgctcgacggctaccggcgccatgacctcgacccgggcgacgagctcggcaactgtgaggtggtcgtcgactcgctcaaccagcccgtcgccctgatccgcatcaacagcgtggcgaccgtgccgctcgccgacgtcgaccaggcccatgcggcacgcgatgggcgcggcttcaccaccgccgcccagtggcgcactgcgcacgaggagttctggaacagcgacgacttccgcgccaagctcggtgagcccaccctggagctgggcgatgacacccccatcgtgctgctcggattccgcacctaccgccccggcgacgtcgtggccgggcatgtggtcgacttctccgacgtccccggggcctgagggctcgccgacgccttcgtccatcgaaaggaatcccatggatcttccccatcgcgccccgaccggcgaggatgctgccccggttgcccaggacaagccgcccttcgcgtggcgcgagctgccaagggccgaattcggcctgcccggagagctgcgtgacatcctgctcaccgcgctgatggccggcaccaagaccggcaccagcagcctgctggccgagttcgaacgcgagggacgcgatccgctggccgaacgcggcggctacgagctggtggtcgactccgacgaggcgcccgtcgcaatcatgcgcattgcgcgggtgcaggtattgcccttcgcgcaggtcgacgtggcgcacgccgaaaccgagggattccccacgatcgagcagtggcgcgacgcccacctggccctgtggaccagccgggtcttcctcgacctgctcggcgagccaccgatcatgctcgacggcgacaccgccgtggtgctcaccaggttccgcgcctaccgccccggcgacatcgtcgccggacatgtcatcgacttcgacgcctgagcggcccggacgctacttcccgaagcgtcgttcgcgctgctggtaggagcgcagcgcgcgatagaagtcgatcttgcggaaatcgggccacagggcctcgcagaagtacagctcggaatgggcgctctgccagggcaggaagccgctgagccgctgctcgcccgaggtgcggatcagtaggtccgggtcgggctggcccttggtgtacaggtggtcggcgatctggttcgggtccagggtgcgggacagttcctcgagggtggttcccttcgcggcttcggcggccagcagggagcgcaccgcatcgcgcagttcgtggcgtccgccataggcgacggcgatgttgatgtggatacccgtgttgtcgatggtctccagcgcggcctcgcgcagggtggtcgccagcgattcgggcaacaggtcgaggtcgcccatcggctgcacgcggtagtcgggcacggcggccaggtcgcgggtgagccgatcgatcacgcccatgaggggcagtagttcgtcgggcccggagcgttgcaggttctcggtggacaacacccacagcgtgaccacgccgatgcccacctcgtcgcaccagcccacgaattcgcgcaacttgtcggcgccggccttgtagcccacctcaagcggctggccgggcgcattggtgcgcgcccagcgtcggttcccgtcggcgagcaccgccacatggcgtggcatctcgcgcggatcgagcccggcacgcagacgtgtttcataggtggaatagatcaggcgggtaggtgagaggcggtcccacgtttcgctcgccccttcgtggtgcaccatggtggcagcctatccgcccgcaccagtcgcccaccggcagaagcggccgacgggccggtggccacgaccagggttcccgatgtcgggcgggcgctacgaccctcgtctgatggaggggcgtccccaccacggatcccgcgcggaataccgcgatcgcggactcgccgacgccgaacctacggtaccgtaggttacgtgatggggtcgcagcgtcagggttcagccacgcggcgccggaccgcgcgtccgtccaccgatggcgcgggtcaccccgccggtgccgagcgttcggacaccgcagcggccacaccggccaagccgaagatgcgcggctggctgcacgccgggatgaccccactgatcttcctggcgatcctggcgctgatagtgcacaccgccagctggtcgggacgcctcgccgaggcgatctacctggtcacggccctgatgctgttcggcaactcggcgatctaccaccgcggccactggagcccccggatctcggggatgctgcgccgcttcgaccactcgaacatcgcgatcttcatcgcgggcacctatacgccgctggcggtgctgatgctccacggcgcatcgcgggtgacgctgctgtgcatcgtgtgggcctgcgccgccgtcgaggtggcctgccgcaacctgtggatgggggcgcctcgcatcctgtacacgggcctgtacatcgcgatggggtgggccgccgtgttctggatcccgcagttctggcgcgccggcggcccgggcgtcgtcatctggctgatcgccggcggattgtgttacaccgtgggggcggtggtgtacgcgttcaagtggcccaatccgtcaccgcgctggttcggcttccacgagatcttccatgccggcaccgtcgtgggggcagcctgccaccttgtctccatctggctggcggccggctgagccgccgcgcggcacccgtcgggtgggcttgaccccgggcgccgctattcgtcgtcggcgatttcgccggcatcggaggccgcctggtcagcttggcgcgccttgtcgatcgtcgccctggccgcgtccaaccagccctggcagatgcgtgcgagcttctcgccgcgctgccacagctgcatggaatcggccagcggaaccccgccggactccagctttgtcaccacatcggccaactcggcgcgggcctgctcgtagctcagttcgggctgttcgtcggctgccatggcagtcctttccttggaggtgtcgggtcgtgggtggggcaatgggtcatcgtgcgggcgggtcgtcggcacccgcgggccccgaaccacccggaagtgtgtcgtcaacctccaccaccaggcgtccgtctgagaggaagaccatcagctggtcgcccggctcggtctgggtcactgaggtgaccgaggcattgtccgcatcggccacgatggcgtagccgcgctccagggtcgccttgggcgacatggcccggatgcgctgcacggcatgggccacatcggtgcgttcgtggtcgagcagccgatcgatggcggtgtcgaggcggaagcgcatcatctcgagctgctcggtgtggcccgacagggcagcggacggatcggagagcacgggacgcgagaccagctggttgagttctgcctgggcgttgctgacgcgggcgatgatcgccgtgcgcgcccgggccaccagctgggccacggcgtgacgctcctcggcggcatcgggcacgatgcgcttggcggcgtcggtgggggtcgacgcccgtaggtcggccaccaggtcgaggatcggcgtgtccggttcgtgaccgatggcgctcaccacgggcgtcgaggcggcggcgaccgcacgcacgagcccctcgtcgctgaacggcagcaggttctccagggaaccaccaccgcgggcaatgacgatcaggtcaacctgcgggtcggcgtcgagctcggccagcgcggccgtgacatcggccaccgagctggggccctgcaccagggcgtggcgcacgcggaatcgtgccgagggccagcgtcgttgggtgttggtgagcacatcgcgttcggcggctgaatcggcgccggtgatcagtccgatgagccgcgggatcatcgggagcggcttcttgcgggcggggctgaacaggccctcggcctggagcttgcgcttgagtttctcgagctcggcaagcagctggccctcgccggcaatgcgcagctcgaagcattcgaagctgaggcgggcggtcttgttccacacgcggggccgcaccttggccagcacggtggtgccctcggtcaggggcccggcctggtcgagcaccgccgtcgtggcagtgacctgggccgacacctcggagctcgtgtcacgcagggtgaggaagtgcatataggcgccggcgcggcgtcgcaattcgatcacctgggcctccacccagatggtgttcatgcgctccacccaacccttgacccacccgacgacggtgctcaaccgctcggcggtctggggggtctggcccggcttcgtcgccggcgcagcggaagccgacgcggctgccgacgccggttgggcaggaccggaggtgcgggcgccctgcggcgacgggggccccgagtgcggcgtggggctggcgggctgcgacatgaccaccacgctagtcgctgggtgcgcccatacactggacgccatgacgcaagagggcagcaccgatcgtcccgccaagcacgtggtggtggcggctccgcgaggttattgcgccggcgtcgatcgtgccgtggtcacggtgcagcgggcgctggccgtgtacggggcgccggtctatgtgcgcaagcagatcgtgcacaaccgccatgtggtggagaccctggaacagcagggcgcgatcttcgtggatgagctcgatgaggtgccggccggtgcgctggtgatcttctcggcgcacggggtctccccggcggtgcgcgaggaggcggcgcgccgcgggctgcgcaccatcgacgccacctgcccgttggtcaccaaggtgcaccacgaggcgaagcgcttcgcgaaggatggggtgccgatcgtgctgatcggccatgaggggcacgaggaggtcgagggcaccaccggcgaggcgcccgacgacatcacgctgctgcagacccccgaggacgtcgatgcgctcgagctggatcgcaaccagccgctggcgtggctcacccagaccacgctgagcgtcgatgagacgcgggccaccgttgagcggctgcgtgagcgcttcccgaatctgctcgacccgcccagcgatgacatctgctacgccacccagaaccggcaatcggcggtgaagctcattgccaagcactccgacctggtgatcgtggtgggctcgcagaactcgtccaattcggtgcgcctggtggaggtggcccgtgaggccggcgccaagcaggcccgacgcgtggacaatgccgacgagatcgatccggactggttcgacggcgtcaacacggtgggcgtcaccagcggcgcctcggtgcccgaggaactggtggacggggtgatcgcccggctggcgcagttgggatatccccgcgccgacgaggagcgcctcgtggaggaatcactgagcttcgccctgccgcccgagttgcgtgagcgccgggccggccacgccgtgcgacgcagctgaggcgggcgtagcgggcgaccccgggccagccgtggccgggtcgggtggggcggcttcgagtgcggccgtgtcgtccaccaactcgggagcggtgagcacccgcggactcgtctcggcggcccgtggtgaggacagctcgtcgtcggcaagctgcagttcaccgaacttgcgggccgtcacgaacacgcgctgctccagggacccgacggtttcgttgtaggccttcacggcaccgcccagcgaacgacccagcttgtccatgtgggagcccatggtggacaggcgctcatagagctcgcgacccagcgttgccacctgctgggcggattcggcgaaggctgcctgcttccacccgtgctgcacggccctcagcatcggaatcaggatcgacggcgatgacaggaagatgccgtggcgggccgcgtactcgtgcaggtcgggacgctggtccagcgccacctggagcagggcgtcactgggcaggaagaggatcaccatctcggggctgcccgcgtccaggcgccagtagttcttggcgccgagttggttgatgtgggtgatcacattggccacatacgcgtcgagcaggcgggtgcgctgatcggggtcgtcggtctggaaggcgtcgatgaagttgcccagcggcgccttcgaatcgacgaagatcaccttgccatcggccaggttcaccctcatgtccgggcggagtccgccgtctgcggtctcggtggccacctgggtgtcgaagtccacccggtccaccagtccggcgatctccacggtgcgcttgagctgggtctcgccccaggcaccccgcacctggggcttgcgcagggccgtcacgagcgcctcggtctcgcggcgcagcgtctcattgctgtggcgcacgctggccacctgctgggccaggtcggcggcgccctgggcacgggcccgctccacctgcagcaggcggtcattcatctcgtggaggctcttggccaccggctccatgagcagcttcgtctcggccaggcgctccccggcggtctggttcaccgccagggtctgccgctgcatcgcctcgcccgacagccgctggaattcccgcgacatcgcctcgcgatcggcctgcgtgcgctccaactgcgcctgcagggcatcgcgttgggccacggcaccggccaattcgccggagcgtccgatgtcccgggcccgcgtgtgcagggcaccgacgaagaagccgatggccaggcccacggccagcagcagcacggcgatcaccacggtggagatactcatgggcccatccttgcccagccctgtgacatttccgggcacgccgtccttcgtccgggcgctggacctttgccgggagcgggggagccgtcgccgactccgcgtgtacgacgtgtcacgcgaactggttcgtgaccgggtgcgctggttcaatggcaaccatggccgaccccagcgaattcatgaccgcctttgcccagttcatctccagcagccccaccagctatcacgccgccgagaccatgtcggcgctgctcgatcgggccggtttcgaggcgatggacgagaaattgccctggaccggtgtcgcgggacgccgctatttcgtgcgtggcggcgccgtcgtggcctggatcgcccccgaacgcgtcgagcccaccaccgggttccgcatcgtgggcgtgcacacggattcgccggcgctgaagctcaagcccgagccggtctacgacaatgccgggtggcagcagctcaacatggaggtctacggcggtccgttgatcaacagctggctcgaccgtgagctcgggctggccggacgcatcaccacccgaaccggtgagaaccacctggtgcgcaccgggccgatcatgcgcgtcagccagctggcgccccacctggaccgctcggtgaaccaggcgctcaccgtggatcagcagtatgagctgatgccctcctatggcctgggcagcgagcccgatgtgatcgagctgttgtgtgggcaggccggcattctgcccaccgaattcgggtttgccgatgtgtacgcatatccgacccaggagccggcactgttcggcaaccagagcgagttcttcgcgtccagcaggctggacaacctctcgtcggtgttccccgggctgttggcgctgctgcgggtgaagtcaccccatgacgtcgtcgtcttctcggccttcgaccacgaggaggtggggtcgtccaccaccagcggtgcggccgggccgctgctgtccgacgcgctcaccaggatcgcggccggactcgaggtgggcggtgatgcctatcaggcgatgttggcgcgcagctcgtgcatctcggccgacgcagcccacagcgtcaaccccaaccatgtgtccaagtacgaccccgtggtgcgtccgctgatgaaccagggcccggcgctgaaggtgaacgccaagcagcgctatgccaccgactcggtgaccgcctcgttgtggctgcgggcgtgtgaggcggccggagtggtgcaccagtcgttcgtgtcgaacaacgacgtgccctgcggcacgacgatcgggccgatcaccgccacccggttgggcatccccaccgtggacgtcggcgtgccgatcctgtcgatgcactcgacgcgcgagatgtgtggcagccaggatccgcagttgctgagcagggcactggaggcctactggatgggggcctgagcctgcgattggcggcgttcggggcaggggtggacgcgctcggcggccggtggctgcgggcggttggaacgggtcgacggtaacctagccagttgtggcactcaccattggaatcgtcggcctccccaacgccggcaaatcgaccctgttcaacgcgctgacccgcaacgacgcccttgccgcgaactacccgttcgcgacgatcgagccgaatgtgggcgtggtcggcgtgcccgacagacgcctggacgtgctgggcaagatgttcgactcggccaagctcgtgccggccacggtgaccttcgtggacatcgccggcatcgtgaagggcgcctcgcagggtgaggggatgggcaacgccttcctcgccaatatccgcgaggccgatgcgatctgccaggtcacccggatgttcaccgatgtggacgtgacccatgtggacgggcaggtgaatcccggttccgaccttgacaccatcaccaccgagctggtgctggctgacctgcagaccctggagaaggtgctgcccaaggtggagaaggaggccgcgatccgcaaggagacgcgacccaaggcggaggtctaccgcaaggcctatgagacgctcgccgccggcaccggcatcttccaggccgggctggatcccgagccgttgcacgacctgtggctgctcaccgccaagccctacatctatgtgttcaactgcgatcaggaccagctggccgacgccgacctgttggaccgcacccgcaagctcgtggcgcccgccgaggcgatcttcctcgacgcgaagttcgagtccgaactggtggagatgagcgacgaggaggccgcggagttcctcgccgataccggcgtggaggagcccggcctgaaccagttggcgcgggtgggttacgacacgctgggcctacagagcttcctgaccgccggcgagaaggaatcgcgcgcctggaccatccacaagggttggaccgccccgcaggcggccggcgtgatccacaccgacttcgagaagggcttcatcaaggccgaggtggtcagcttcaacgagctggtcgagtacggcggcatgaaggaggcccaggcggccggtcgcgtgcgccttgagggcaaggaatacgtgatgcaggacggggacgtggtggagttccggttcaacgtctgagctatggctactgggacgcgggccccggtggctggaacaacatctggttcgggaacctggggtgagggggaaagctagtgggtgcgtcgctcgccgtgaactggatagggctcgcggccttaatcatttcgatcgttcttgctgtggtgaggttggcggagtggtggacgaatcgccgtcggaaatatgtcacttgtcagtcacagtcagttgggattccggcgggggatgggaagagcgtttcgactcggtcctacgtgacagtcaccgtaaccaccgagggtgctcccatcgcgatcgcccggctcggctttgagctcgtgggggagtcctccgaatcaactcaagaacccgccatgggttcggtgaatgacattccgacactgtctagagctggtttgccaccaaccggcttcggggatcccgtgaaccttgcgtcgggaactagcgaagcgtgggcggtttcactgagcgtcccaccgttcgactactccaccatggtgggctacatgtttcgtgctgacgtggagttgaccaatggaaagcacatgtattccaagccattttggcatgttcctagtccccccatgggatggtcgggagatgacgtgaacgcaaggctctccggagcatgagacgaagcgtgagggcaattcgtggtcgaatcgacgggctggcctgccatcagtcctataagacgtcacctgccgacgacagtccgtccctgtccgggcgggatgcttgtgtggtcccgccgactgctcatccgatggagttggtgccctgatatccgtcacggctgagccgccctagcggaatgcgagtcaactgggagggtcatttggcggctgagggaactcgttgctgtcgggttggcgtgacctcggggcttgggtgtggctgtccgtccaaggcctgtgacggcagatccttcgagtgaccggtgaccgaccagagctacagacgttgcgtgacgaggttgtcggaatcaaacgtcacttggtcgcctagacgggacagaagactctgcgggccccgcgttcgccgcagacgggcatgccattggctcgagtcgttcacatggcgcggagacgtaccgtcggctcggtggggccgacggggaaggacgagtcccgaccccgaccacaggaacccatgagttccgatattattctctcgatcttcctcacccccacccgagaggaacgcgcggaccgctgaccgcgcgacgaatgcagatgagcgattcaaggcgagttcctgcccttgctgcccagcatctgtttctgcctgctcggcgcaccagatagggaacatgtcatgcagctctattgcggaaattgcggtgctcctcttcccaccggcgccaccgtctgccagcaatgtgggacgccggtggccccgctgacatcggaggcgaccatgcctcccacctcgccgacgcccccggggaaccaacccctgtggcagcccgcccagggctatggggcggaggcgcccgccgtggtcaccgctcccggcagtgcgccgcaagcaaccgccggttccgcggccgtcacgccgtgggcagtcgtcctgctggtggtgggtgcagtgctcctcttctccgtcagcttcttcgcgggatacctgtgggggtgggtgtgatgaaacgagtcctcatcgtcgtgttggcgctgctcctgatcatcgccggaggcctagccggcaacgcctttcgcaatgcacgcatgctcgcagagggtgcgtcgtacaggttcagcacaaccgtgaacccggcggcctcagcctcggccacgcctgcaggcggctcgtcgcccagtgcgtcgaccggcgccggcaactcagcgaccattgatgtcagctacgaggccgtgatcgcccacgtggacaagtcgaccgtggcccaggtcaccaaccagaccaccggacagggctggcaagcgcacatcgcgcgcagctccggtagcggctatacgctcaccgcccccgacatgccaagcttcacgatcaagcagagcgccaaccccttcggttcggcgtccctcagcacatcggccgacgagatcgccgccaaggacaagagcctgcaggcgcaacatccggcgacatcggccccgagcgcccccgcttcgccgagtcagggccccaccgccgcgccgtctccatcgtccgtggcgcgcacccagatcctctcggcttccccactccttgcaaacgggcagctcgatccgggagtcactgttcgcagcggtgacccgtcagcggccagcgccctcgagtgcacgaccagtggctcaatccttgagtcgttcgactgctcgcccgcccttgtcacgggcgcggaggcctgctggctcgagccctccacgggcgccggcagcgtgaacatcctgtgtgtcgacgcgcaaccccggacctttatccggtacaagaatgttgcagtcgcgaccggtggatcggcttcgggttcagagcccatctggattgaaaccgatgacggatctcagtaccgggcgaaggcggacggcgcgcttgatatcagttctgataactactcccctatatttctctgcgcggccgggccgtgccggcaaagtggtgacaacgtgctctggagcccaacggacgcgtcgccacacatcgacacgagtcaggggacctggcgcgtgctggtcggcactgtcacctccgaagcgcccgcagtgaagcgcagcgaggccgtcaccaaggcgtgggtcaccagcggggcttgaccgggccaaaccgagggggaccccggtgaggcaggcggcgcggctcacagggccggcgacagcgttcgacgcgcatgacaaaacgggagaaccatgaagaagttacttgccggactgctgatcgtgctcatcgcggtggccggctttgccggcggcaacctcctgcggcagcacacgatgctggctgacggtgccagctatcggttctccctcgtggtgcccgcagccgaccaatcggttgccgcggccaccgcgacgccggcggccgacagcgtcgctggcccgccggcaggttcatcgctcacctatgaggcggtgatccacacccgggaaggatcgtcgtcggccgacatcgttaatcaggtcacccagcagtcatggcgggccgaggtggtgcggtcggtgggcaggggatacaaactgattgcccccgatcgacccaccttcaccctcgagcagtcgctgaaccccctggcacgacccaccctgacgaccacgccccaggaggtcacgagccacccggaagccgccccgtcagccccggtatcaacgccaacacccgcctgccgggtctacagcggagctgagctggggcagatcgtcgggcgacagccgatcgcggaacgcgggccggcgcatcaggaaatcatgtatgacaagggcggttggacgatgctgaagcttccagacaggtattacgggagtgggtcgtggcacattttccacacggtcgactgcgtgccccgcccagttctcatgtatggcagcgacgcaagcgacaacttctcggtggccaggatgacggccgcgggcatcccggccgaccttcaggccttcgtgcgtggactggggatcttcccgtgacctcccggtgtgtcgacccagcgatggtcgcgcgccaacaagtcctgcagggccgccgctgctgaccccgcgggggcggcgtcgccatgccaggaaacgccgatctcccgacgcgccgcaggatggtcgatcggaacctccaccacatcgtccgagggctggatggcgggcggcaggatggccacgcccaggcccgccgaggccaggccgcgcaacgtctggatgtcctcaccctcgaaggcgaaggtgcggctgatcccggcgtcgcgcaggagctcgtcgacgatcgtgcgcagtccatagcccggagtcatggccaacaacctctcgtccgccagctccgagagctggacgcgatcgcgcccggcgagacggtgctcgggagccaccgtcagcaccaacggttcggcatacaggcgcagggtatgggcatgcttggtgggcggcagcggcggtgagacgaggatggcgtcggcaacacctttctcgaacaggtcaatgcagctctcccgggcgccctggcgcaggtcaacgtgggcgtccggccggtcggcaagcagggcccgcagcagcgccggcaccacgcggcgtccgaaggtgtgctggaaggcgatcgtgacgctcgccccggcgcgctcgagctcgcgatgcacggcagtgaccccggccagcgccgccgtccgggtgctgcgtgcgtagtcgagcagtgtcgtgccggcatcggtgagggccacgccccgtcggtcgcgacgcagcaacggggcaccgatgcggtcggacagcctggccatggcgcggctcacgctgggctgcggcactcccatcacctccgcagcggcggtgatgccgccctcatctgccaccgccaccagaaagggcaggtcggccagcacctcgcgcagggttgtggtgtccaggggctcatccatacggaaatgatatgggagggctccacgctatgcattggtgctatgtggatctgcgccgtagcgtcgtcctgtgagcgtgaggaccaggacacgacaggcagcaacagccgattcggcgcaggccggctacgcgccgggatcgcgcgaataccgacgtgtggtggtggcactgacctgcgccgggctggccaccttcgcccagctctactcgccccaggggatcctgccgctgatcagcgcgcgactgcacgtgaccgccgcccactccgcgctgctgatctcggcggcaaccatcggactggccgccggcgccctgccctgggcctggctgggtgaccggatcggcaggctgaccgcgatgaagtcggccatggccgccgccaccctgtgcggggcactcgggttgctcatgccgggcttcggcgcggtgctggcgctgcgcgtggccgagggattcgcgctgggtggggttccggtgctggccatcgcgtacctgggtgatcaggtgagtccggcgttcaccgcccgggccgcggccgtctatgtctcgggcacctcgatcggtggacttgccggacgcctggtggccgccccgatcgcggagtggttcggctggcggatcggcatggcctcggtgttggggttcgccgccgtggccaccgccgtgttcatggtgatcgcccctgcagtccgcacccccgggaggcccgaagggaaggggcacggcacccgacgggccgcgctgcgcgccctgctcgagccgggactccttgcgctctatgcagtcggcttcctgctcatgggcggcttcgtggccgtctacaactacctggccttcaggctgcgcgccgcacccttcggcctgccgaccacggtgacctcgctgctgttcctggcatatctggccggcacggtgtcgtcccagcgggccgggcgactggccggacgccgtggccgcctgggcgtgctgctgggtgcgatcgcggtcttcatcctcggagtcggcctcacgctggttcccgcgctgccggtgatcgtcgtgggactggtggtgctgaccgccgggttcttcgcggcccatgccatcgcctcggggtgggccggggtgcgtgcgccagccggcggggcacaagcgcccgcgctgtacaacgtggcctactacgccggttccagcgtgatgggctggttcgggggcatcgtgttcgtcggcatgggatgggtgggcctggtcggactcgtcgccgtgctcgccgccgcggccgcaggcctggcagtgtccaccctgcgcggagccgagaccgtcggctgatccgctgggcccagagggcatcgggtcggaccacgatgcgtcatgttgccgccctatttcacagcgtcacatcaccggggctggaccggatccatggccagtgccgcgagcgtggatcgcgtcgcggtgggcaacgctgtgggcggaacaagtgggcgccgcggctccttgttcgtgccgtcagccgctcctacgctcaccacatggagtcaagaaccacgcgttcgacgcccgacgtgggcagccgggcagcggaggacccgaaggtcccggatacggcagtcgacggcgatgcgacccgagcgctccccacgacactggcggcgcccacggggctggcggccttcaccatgcttccaagccaggacgccggtggcgtctgcgatatcgacgggacctgccactgatgaccacgcaattgtttgaccatgccgacgaccgcattgccgtggacgtctggagcgacgtcatgtgcccgttctgctatctgggtgatggcctgctgggcaaggcgctggaggatttcccgcaggccgatcaggtggacattcgctatcacagcttcctgctgatgcccgaccttcccgagggcgtcacgagggacctttccgatgtgctggagaacgagcgcggatatccccgtgagcagaccgaggcgatgaacgcccgtatcaccgagcagggcgccggaatcggcctggattatcacttcgacgacgccctggccacgaacatgcggcgggcccacgagctgtcccacttcgccaaggacgcgggaaagcagcacgccatggtgcagcgcttgttccgggcctatttcaccgaggggctggacctgggcgacgtggacgtgctcgccgatctggccggtgacgtcggcctcgaccgggatgcggccgtggctgcgttgcaggcgggaacctatgccgacgacgtggagaccgatatcgcgcaggcccagcagctgggcatctccggggtgccgttcttcgtgttcaacggcaagtatgcggtgtcgggggcccagccggcggaggccttcagtcaggtgctcaatacggtctggaaggaatcgaccgaagcagcaccggcaggtgaatgatgtccggtcaccgaaggcgtgcggcaacgccgtgacgcagggatggtccggaaacagaacagtcccgacataggaagaagccccgagaggatcattctcggggcttcttcttcgcagtggtcggcaactggctcaagttgcagcaaccacgggatatggaggctcttcccaatcaacggtgtagttgctgcttgaagccgccggtctcgaggaggctgcgggcgatctagtgggtgaggttgcgcaagccaacgcgatgccgcgtaggtgctcgagtcgtccgttgatggcctcggttgggccgttggacgtgccgggacggtcgaagtaggccagcacgtccgcggcgcgcttgttcagcgtccggcccagtcgagcgacctcggcaagaccggccggaacaccacgggccacggaggcgatcagcgcgctcatggtggccttcccggcagtgcggtcggggtcgcggtaggcggcgatcatgcgctggtagacgctccaggtgacctcgaccgcgacatgacgctcatcggcgaacaagtcagccagccggaccttctggcggtcggtgagcaggtcggcgccggtgtgcagagtgcgtcgggccctgtacagcgggtcaccggcgcggccccgtcggccgaagatgtcctgctgagcgcgttgtcggcattcgtccaaggcgtcggcggccaggtggatcacgtggaagggatccatcacggccgtgacgtgcgggatctcctcgaccacggccgtcttgaacccggtgaacccatccatcgcgacgacctcgacctgttcccgccacgcctcgtcgcggctggcgagccacgtcttgaaggcggccttggaacgcccttcaatcatgtccaacagctgcgcagaaccggtcccatcccgcacaccggtgaggtcgatgatgacggtcacgtacttgtccccgcggccgcaaccctttccaacgggcagcagcagactgaaccgttcagcctgctggtcgaccacaacaaccgaatcgacacgcgccacggtcaacccgttcgcttcgcgatcgaggaacgcagccgtcaactgttggttgacccctaccgagacacggaacccatcaaccccaggtacctgcgcgaactcctcgagaagaagaccacccgacccgagagttcgttcctggacacctggctcgccgcccgcgaccgacaggccgcagcagcccgcaccgtcgaccaactagctgacgaggagaccggtcaaggaatcccacaccagacccgcgacggcggcgccaatacttcctgacgacgacagccctggcgatgcatgacccggtctggctgttgcccgtggggccctgcttcatcgatccatccgcctgaaacatcgagttgctgcgtaccaggcgtggccacaccgcgccgtagctacgcctggccgaaggtgcgggcctcactgataaacccttccgagcatctctggtgtgtcctgccatccaggcgcacgtaacgtttcacttatttcagatgctacattcgtgtcagatacggttccctggtggtgccggagagaaggaggatcgtcatgcctgacaccttgcacgctgctgctgtggagccccacgatctggaacagatcgcgtccttcgctgagcagctccctcagggatcgccggtatccgtcgtgctccagcacctcgtcatgagcttgagccagggtaaggacgtcacgtacgccacgacccaggagaacctcaccccacaacaggctgccgagctgttgaagatgagccgcccgcacctgatgaagttgattcgtgcgggcgcgctagaggccgagatggtgggcacgcatcaccgcatccccatgactgagatccttgctttcatcgatcgccgcgagcgtgcaaaggcagaggttgccgtcgcttacagcaccacagacgcggtgcggaaggctgcgagtgatgccgtcgctcagctcaccgatgaagacatcgcggccctgaacgcgctgtaggcatcagccctggcggcgtagcaggtctagcacggcctgtgcggctggcttctcatcctcgcattgagggcagataggcagcccggaggcgtcgcttcgagatgggatgaaccatgcgccacagacaccgcgaacgggaatactgttgacgaacccgtccaccaggaacgtcgttccgacgtagtgcagatgagtcgcagcggctacgtcgcgcggtgcgccctccttgtactccggcatatccgccattagctgaacaagccgtgcctgcgtgatggagaccatcgcgttgaaagtgttgttctggtcataccagggctccaccttcgaagggtcgggctccagaaagggcaggcacaccgtctgtacggcttggtgcagctcgctggacgcggactgcccgaggcgcagagtcacggtgaggagtgaatctctgtgctgcgcctcgtgtgcgtcgctagcgggctcatcgtgctctgcggtgacagtaaaggacaccctggttccctcgctaatgcccggcatcgtgaccgtgtgctcgccacccgaacgcacgcactcctgcaaggcgctgacgaaccggccaagcacatcactcttccacgcgagagcgcgcgccgagacttcttctcgggcacggatcttgtactcagcgggcgacggcagcaaggagtcaaacgcgagggtggcgacctggttatggaagtggttgtgttgacctgcccacaccagccaagggtcgccctgttcgtcgaggatcacggcaccccgccacgcagccccagtacggtcacggacttcgaagacaggcgcgccgaaggccttcgaggctgcgacgtgccgatcgggcattccgtgctcaaaccgcttacgggcgtcatcgagaagtgggtggtcgaggccgaatagctcgagccgttcgaaggcactgttcgcgatgaggtcaagcacggtggtgtcaccgaacgtctctcgtggaagagtcttcagcaccttgatcgtcggacgaacctcgcgcacagtcgctcctgatgtcatcagggcacccatcgcaccccgttgcagatgtttacctcatgatggcaccgacgcaagatcggaactgcacgcagaaaacgccccgcgtcgagggcggccggtggtcggatctgctacgagcccccgtacgccgctaactggggatggctgagcccctgaccctgtaggtgttgcgcttttttgcgctgcgaaggccgatcctgacgccgatacgaactcttgaaccgtcccaggtttggtgccgcatcttttcgagttgagaggatggcgtcatgccgaagaagattgaccccgctctgcgtgagcgggccgtgaggctggtgctggagcaccggtcagagtacccgtcgaacgcgaaggtgatcgcggccgtagcccggcaggagtgcgtcggtgcggagtccttgcgacggtgggtgatccaggccgagattgacgcgggtgaccgtggtggtcagaccagcgaagagcatgcggagatccgccggctcaaggccgagaaccgggcgttgcgtgaggacgtcgcgatcttgaaggcggcgacggctttcttcgtgggggaactcgacccccgcaaccgttgatgatgggcttcatcgaccagatgcgctcggagggctttgccgtcgagtcgatcattcgcgtcctgcgtgagcagggcgtgaagatcgcggcacgcacctaccgggcctggaagcgaggccgggtcgcggtccggaccgtgaccgacgcgatcgtcgtggacgcggtccgtgacgcggcctggcgcgacgagacactgcccggcgggagcacacgccggaagatgaccccggagggtctttacggacggaagaagatgaccgcgttcatccgccgcaccacgctccgggacgtgtctcgcggtgcggtggaccgcgcgatgcgggccctgggcctttccggggtcacgcgggcgaaagcgatccgcaccacgatccccgccaaggatggggtccgtgccggggacctgctgaaccgggacttcaccgctccgcgcccggatcacacgtgggtgacggacttcacgtatgtgcggacgtgggccggatgggtgtatgtcgcgttcatcctcgacgtgttctcgcaacgcatcgtcgcctggcatgcgcagaccagcaagcacacggaccttgtgatgatcccgctgcggatggcgctgtggcggcgtgaccgggacgggcatcccgtcggtcccggccagctccggcatcactccgacgccggatcccaaggcggattcaactggtcgtcgcaacaccttgacgtggaaggtgttggcgatggcagcgaacgacagggaccagagcacgagggacgcgccacaggtgttgcggcgccagtggcgtgcagatcgagcgttgcgcccaccgatgcgttcccctgggcgcccacgccagtcaccttcgcggcgagtcgaacggcagttttggcgccagatcgccacgggcgtcacaacggcggaagcctccctcgcggtcggcgtgtcgtgccccgtcggtgcgcgctggtttcgacacgctggcggcatgccaccgatcagcctggccgagccgtccgggcgctatctcagtttcgaagaacgtgaagagatcgcgatcctgaacgccaaaggcgtcggcgtgcgcgcgatcgctcgccagctggggcgtgatgcaggcacgatcagccgtgaactacgccgtaacgccgccacccgtagcggccgaatcgagtaccgggccacggtcgcgcagtggaaagcgcaagaagcagcgaaacgcccgaagatcgcgaagttggttaggaacgagcgtctacgcgactacgtccaagaccgccttgccggcggggtcacccatcctgacggcacgcccgtggcgggcccggccgcgccggcgtggaaggggttgaacaagccgcgcaggcaggatcggcgctgggccagttcgtggagcccggagcagatcagtcatcggctgcggttggacttccccgatgatgagtccatgcgcatcagccatgaggcgatctatcagtcgttgttcatcgaagggcgcggcgcgttgaaacgcgaactcgtcgcctgtctgcgcaccggccgcgcgttgcgtgaaccgcgggagcgttcacggaacaagccccagggccatgtcagcgctgaggtggtcatcagccagcggcccgccgaagcgcaagaccgtgccgtgccaggccattgggagggcgacctcatcatcggtaccggccgctccgcgatcggcacgctcgtcgagcgtcgtagccgcaccacgatcctcgtacatcttcctcgacttgaaggctggggtgagcagccgccggtaaagaaaggcccgtcgctgggcggctacggcgcgcaggcgatgaacaaggcgttgagcgcgtcgatcacgtcgcttccgcagcaagtgcgtcagacgatcacgtgggatcggggtaaggaactgtccgggcacgcccagttcacgctggagaccggcacgcgcgtgttcttcgccgacccgcactcgccgtggcagcgaccgacgaacgagaacaccaacggtgtgctgcgccagtacttccccaagggcactgacctgtcccgatggagcgcgaacgaccttgaagctgtcgctcacaccctcaacaaccggccacgcaaagtcctcggctggcgaacccccgcagaggtcttcgacgagcaactacgatcactcgaacaagccggtgttgcaacgactggttgaacctgcccaatacacatccgtagtgctgaccgatcacctcgcgctcgagcagatcgcaccctcgatcggaagcatcggcgacgcgtacgacaacgccctgatggagacgatcaacggcgtctacaaggccgaatgcgtccgcaccaccatcttccacgacggcccctacaagacgatcgcggacgtcgagttcgcgacagctgggtgggtcgactggtacaaccaccgcaggctccacggtagcctcggaatggtcagccccgacgagttcgaggcggcctactacgcggccctcaacccagagccgctccccgcatagaagcggccgagaacctgggacggttcatgggcctgggggtggaagggttggccgttcttttgctcgatgcccaggggggccagcaggtattcgaaggcgttgcgggcgccgcgggagcgggtggtgaagacgagcccgttatcggtcagggtggaggctggtggcccgtaggtggtgatgttcgtggtgaagctgtccacgacaagtgcggcggtgacgcggcggtgggcggtggcggagagcagtagccgggagtggtcgtcgagccagttgaggatctcgacgtcgctgccgtcggccagcggccagtggtgggggcacctcccgcttgcgggggaaaatcggattgccaggtttcgttgggttggtctgcttcgaaccggtggatgctgcttttggggcgcttcttcggttctggggtgatcaggtctgctttgtgcaggatccggcggatcgtggaggtcgacggggcgcgcgggtgttcgtgttcgaggtgccaggcgatggtgaccgggccagcgtccagtccggagtccgtgaggacgcgacgcagggccaggatgcgggctcgcacgggttcggcggtggcggcactgttgctgcgggggcgccgacttcggggctcgatcgcgtcccaaccgccctgttcgtatcgtcggatcagttcgtggacccatcgccaggacacccggtagcggcgggcgacctcggcctgcgtttgctgccgctgcgtgacggccagaacaatcagacgcgctttagacatccctcatcgtcacggaccactatgaacgatgtcccgactcacctatgaacgatgtcctgaacctacacaccttcagctccaccaatatgttcaggcaatgtgtttcagcaatagcctccgggctcgtcgatgtggccggtggcgaggatttcgccggtgtgccggccgtcgcgggtcagctgacggcgtgaggcgatgacccgttctcggaccgggcgcggccctcgccgccacgcgattctatggcctgcccagcctctgaccgatgtctcgactcatccgtcccggtggacctagggagtcgagccctaggtccacccgagatggataagacatcgctcaggctctcacggcgtcgcgctaccttggggacttaggcccagtccttgtgcggcgacgtgccgccgataccggcgttgaacgtattcgtcggatcgagctccttgaagtgctcttccatggactccggcagcttgtagatgcgaccgtagttgtgctcggcgggcagcttcgcgccgcgctcctccagcaggtgctggatgcggtcgtgcagcgcctcgggatccacgccctgcttggcgacatagtcctggtgcatcacatggcagaagaagtgcccgtaatacgccttgacctcaagctggtcgtcgatctcctccggcagcacctcgagccagttccaatcgtcgcgacgcagggccacatcgatggggatgagccctgcgatgtgccggcgcttcaacgcggcgtagcgagtggcggcactggccgcgccgaaccggttgagcgacgcgctcttttcttcatcagacgtgcagatgaagaactcaccagtgtgctcgggctctgcgaagaactccttgagcatcttctcgctcgcggccttctgcgactcgctgacggtgagcagcaggtgatgctcgaaacggttgcggtactccatcatgcgcttgggcagctggttgggcagcacgctgaacatggcttgcgataccgtgtcggcgaaggtcggaccaatgccgggaatcttcgagaacaagccgttggcccacgtcttgaacgagaacatgcgcgtctgcagcgctggactcatgaacttcaggaagacgaaggtgtctttgccgtacttctcggccaagtcgaaggcactgcggcccatgtactcaccagagataggcagcggcatgtcggcttcgaggaacaaccgacggatctcttcgagctcgtgcgtgttgttcgtgccgatgtaaaacacggtcgggtgcacttcgcgagggaaggtgcgggtgcgcaccgcgaacaccatcagcttgccggccgagccggaagcctcgaacaggtactcggggttcgcattgtagcgagcaggcgaaggcacgatcttgcgcaagtgctcggcgtactcggtctcgttcgagtcttcgggagctggggtgacatcctcgggagaccactcgccgcgctgtagacggtcgagtgcgacctcagggtcgtctccgagcgagatgcccaggtgattgaccagctcgaccttgccgtcgtcgttgacgcgggcgaagatcgcttcgcgcgtgaatgccggacccttgcgaatctggctgccgcccgagttgttcgcgatgccgccgatgaccgaggcgccgattgatgtcgacccgatcaccgagtgcggctcgcgctggtgcttggcgagcgcgtcggtcaggtgtgtcagcggggtgcccgcgagcgagatcgcctcgcgcgcgtcgttgatgaggtgcacctcatcgatgcggtgagtcgagatgatcacaatggggcgatcgtagtcttggaagccggggccggatccaccagtcaggcccgtgttcgatgcctgcgggatgacgatgaggttgttgtcgacggatacctgcagcgcccgccacatctcgaccagcgtgccggggcgcaccacggcgaagactggtcctccgccgaatcgatagcctttgctgaatggcatcgtggcacgctcagaggtcagtacatgttcgtcgccgacgattctcttgaacgcatcgatcgcttcgtgcgaagtcgtggtggtctgtcctggttgcgtcatctctaagcctcctatattcagttgcatcacaagcgcgtcatgatgctgaggggatgtcgccttgatcctagctagtccgcggtcgttcattttttgatgggcggggaaacgagccagggggacgacgtctgcgaccgtctgcccggaagctcgctacggcgtccaaggagtgtgcgtgtgcgtatgcatgtgcatacgcgcatcctcattgtagaagatgcgcatcagatagtttcggaccgcggtactttcggactccggtaggttcggaggctcttcccagatgagggtgtagcgcacgtcgcgcggcgggccggcgcgtcggtggccggatagaggtcgaggtctcccgaggatgagagctcctacacactcagcccgaaagacctcgacgtgcacgacgctaccgtcggcgggcgcgctgatgcgttcgccagccccgacctgactgccttctgccgcctcgacgaactcggcctcgttgtcaccgggcagcgactcgagccggatcgtgccgtattggcctgccaggtggtcgagcccgaccagtggtgccggcgctgcggctgcgaagggagaccacgtgacaccgtggtccgacggcttgcccacgaaccactgggctggcggcccacgacgctggaggtcgtcgtgcgccgttaccgctgcagcggctgcgggtatgtgtggcgccaggacaccaccgccgcggccgagccccgggccaagttgtctcggcgcgctctgcggtgggcgctggaagggatcgtggtccagcacctgagcgtggctcgggtcgccgaggggctcggggtggcctgggacaccgccaacgacgccgttctggccgagggcaagcgggtgctgatcgacgaggagcaccgcttcgagggggtgaaggtcgtcggggtcgatgagcacgtgtggaggcacacccgtcgcggcgacaggtacgtcaccgtgatcatcgacctcaccccagtgcgagatggcaccggcccggcacggctgctggacatggtcgaaggacgctccaagcaggcgttcaagacctggctggccgaccgcccgcaggagtggcgcgacggcgtggaggtggtcgcgatggacggcttcaccgggttcaagaccgccgccgtcgaggaactgcccgacgtggtgaccgtgctagatcccttccacgtcacgcgcctcgctggcgaggcgctcgatgagtgccgacggcgagttcagcaggccatctgtgggcaccgcggccgcaagggcgacccgctctatgccgcccgccggaccctgtccaccggcgccgacctgctcaacgacaagcagaaggaccgactggacaccctgttcgccgacgacgcccacgtcgaggtcgaggtcacctggagcgtctaccagcgcatgatcgccgcctaccgccacgagaaccggcgccacggccgcgagctgatggcccggctcatcgactcgatcagcaccggcgtccccaaggccctggtcgagatcaccaagctcggcaggacgctgaagaagcgcgccgccgacgtcctggcctacttcgaccggcccagcacctccaacgggcccaccgaggcgatcaacggcaggctcgagcacctgcgcggctcggcgcgggggttccgcaacctgaccaactacatcgccagatccctgctcgagaccggcgggttcagacccgactacaccctggattcggatgagcccctgaagggtttgatccagagagtgtggggatgattcgggtcgagtaggcggcagtcctgccaacgagagttggcgggtagttcacaacagtggggcagatgtacctcgcgtgagaccatgcagtcatgagcgattccctaaaagagcggttcggtgcgaaccttcgtgccgagcgtcagcgtcggcggctcacacaggagagcctcgcggagttcctgggcgtcacgccgcgatacctgggcgggttggagcgcggcgagcgcaatctcaccctcgacagcatcgaggccctggccgagcagctcgatatcgacccgctgcagttgctggtgggtcccgcggcggcgcgccgcattcaggcgcgtcgcgttcagctgcgttctcgctcgtagccccacagcccgcgcgccgagctggtgaccccgatcgcgccgtgggccagggcatcgtccacatcgtcgacgttcctgacgaatcccgacgccaggaatggctggagcttcggcagggcggccgggtcgaggcgtccgagcaccggggccggggccaccagggccgggccggcgtgggccgattccagtgccgacagcgccgagtcgaccaggctcgcgccgcccagcacgagcgtctggatcgcaaggaacccgtagtggggtgcactttgcagcagggagagacgcgtggtgacgagtcccgtcacccccatcgcctgcagccagtcgaggccggcccggtcgcggctgaggcccgacagggaatcgaggttgaccaacggatggatgtcagcggcgatcaactgtgtgagggcacgctgcaatgcgatcaccgacaacccgccgagcagacaactctccgtgggggagtcgaggaagccctcgagcgcgtcgacgccactcacggcggggatcaccggtgagtgggcgagtcgcgtcatgagggaccggcctgcgggcactgccatgagccggtggatcagcgcgttcggcaacgttgccgaacgctcgtcatggggtgcttcccggtcgctcatggtcgccccgatcgctcgtggatttccccgtcctggccgtgatgctaccaacgcaggggcttcgggaacgatcggggccaggcggctcctagagtccgtacttgcccggattgagcatcctgcccgggtcgagcgcctgcttcaccgcacgcaacacctccatgcccccgcccagcgattcggcgacatagggagtgcgcaccacgccgacaccgtgatggtgcgacagctggccgtgttcctcgatgatcaccttgtcggcgacgtcccacaccgcgcggtaccaggcggcgcggtccttgatcggtagggtgccctggatcgtgaagtagacgcaggccgcgtcggtataggcatgcgactggtgcgccgagaccacgaaggtgccctccagtgcgccgacctcgctctgcacccgctggtagatgcgcggcagctggctccagccggcggtcatctccagggtgtcggccatccacgcgccgtcgtcctcgaaggcgttctgcgccggcacctcgaagcgcgtcgccaaccacttctggaagatcggctccgcatccacggcggtgccggtcgttgccgcctcgtcggaggcaatgtccaccgtgacgtcgaccagccgcggatcgccctcgtcgaggatcagcagcagggtgttgccaccgttgccgaagtagtagtcgccctccatgttgtcccacagccgcagtgccgcgggcgtgacgcccctctgcatgatccgccggcaggcatcgagcccggcctcgaaggtgtcatattcgtaggcggcatatctggcgtagtcgggcagcgcgtgggtgcgcaggacgacgcgcgtgatcacgccgagcattccctccgagccgatgaacagctgcttcaggtcggggcccaccgcagcgcgctggcgtccgcccagggtcaccagctcaccggagggcagcaccacgtccagctcggtgaccatgtcctcgaccttgccgtagcgcgtagacaactgccccgcgccgcggcaggcaacccagcccccgacggtggacagtcccaacgattgtggccagtgcccggtggtgacgccccatgcggtctggaggcgttcctcgagcacatcgccgaacacccccggctcgcactccgcggtcaggtcggtggggttgaagccgaggatcgagttcatcgtgtggatgtcgagcacgatgccgccctccagcggcagcgtcgacccggtgacattggagcggccggcggcgacggtcaccgggatgccgttggctgccgcgagtcgcagcactgcctgcacctgcttgacgcccgaggcctccacgatcacggcatcgggcgtggcggggtcgccgtcggtgtgggccagcatggtgcccggccaccagtcgcgggtgcgttcggccgtctcgtcggtgccggtgtacacggcatcgccgatcccgcgcagctgctcgacgatcccctcgggcacggccaccacccgcccatcgccgtagcgtggcgtggcgccggtgatgggcttggccagtccgtcgtccacccagcgcggcggggtgaattcgcccaccttgtagtagccctcgctgtagccggtgacctggaactgcttgctgatcatgcctgtgcctccgtgttcgtggtgagcagttgacgttcggtctggatggcctcgtggtaggccgccacctggtgatccacctgctgtggggtccagcccagttccggggccatcagcccggcgacgcgccgggccgccccatccgaggcgtcgcgggcgaacaggcgcagtcgggtgcggcgggcgagcacgtcatccacggtgtgggccatctcgtggcgcgcggcgtagacgacttcggcggccagatagggctggccggccacgatcggctcgcgcatcgccggatcgtcggccatgatctgcgacacgaagcgcgactcggtgccgtagcgctcggcgaggtggtcctcccacccaccgctggcggtgaaggatgcctcgtcatagccggcagcccccagaatcggggtatcggcggtgcggcagcggcgttgcacgcccagcaccttctcggccgcgtcgatgccctgcatgcccatgtggcgtccgatcgtgagcttgccacccaggatcgacaccagcccatcgggatcggtgcgcacctccgagctgcgggggatctcggcggtgttcttggcgttgctcctggccaccagcggccgggtgcccgcgatcgagccctggatgtcggcggcactcacgtcggtgtcgaacgatgaggtgaccgcatgcagcagcacgtcggcgtcgtcggcggtgcagccgacgtggtcgaggtcgccggtgtactcggtgtcggtggtgcccaccagcaccgagtcaccccaccgggtgatggtggccggtgtcttctgcccgggcacctggaaggtcagcgacgaggtgttgcggatcttcagccagggcagggcgatatggacgcccttggccgggcggatcgtgggggcgtcggtgcccggtgcggtgccgtcccagtcgcgcagccacgagccggtggccatcaccaccaccgaggcgcgcacgacgatctcctggccgtccgcctcgacgaccgccccgctcacccgtccggtgtcgcgggtgatgcgcgtggcgcgggtgtagttcgcgatcgccgcgcccagggcggcagccgagcgggcgaccgccagggacagccgggcgtcgtcggcgcgtgcgtcgtagaacaggaagccgttgatcaactgctcgggcttcagggtgggcgcgtgcaccaacagctcgtcgcggctgagcttgcggtgcagcacgccctcgcggtagccgcccagcacgtcgtaggcgctcagggcggcggagaaccccagggacagccggcggtcgaagaccccgtggcgcatcatcaccgggaagatgaacggaaggcgctgcaccaggaagctcgcgttgttgcgcagacgctggcgttccagcagggaatgggccacaaggcgcacattggcctgctgcaggtagcgcaggccgccgtggatcatcttcgacgacttggacgaggtgcccgacgcgaagtcgcccttctcgaccagcgccaccttgtgcccgcgcagggcggcgtcgaaggccgcgtaggcgccggtgatgccccctccgatgatgaggatgtcgaagcgttctgacccgagccgggccaacgcctcgctgcgctccagccgcaggggccctgcgccggcctgctgcctgagtgccgccttcacgtcgctgctcgcgaccctgatcatggtgccccccggggttgaggtctctgccggggccctgggaagcgaaaaagcacaagtcaggacctcgacaagaggtctgagttgtgcttgtcttcctccactgtgcaggccgcggtgcgcactgtcaagggttcgcaggatggcggcgctatcggcccgggcgcccgacgagcagactgggtacatggtgaccacacggcccccgcgccaccggccggacagcagtggcagcggcgggggtgccgcatggctcgagcgttggcaggtgccgctctacctggcgtccctcgccctcggtgccgcggtgggatacctgtggcccgcgggtgccctcgggttcggcaccgccatcaatccggtgctcatggtgctgctgtacgccaccttcctgggcgtgccgttcgcgcgcatccgggcggccttcgctgacgtcaggttcatggcgtgtgtggtggtgctcaacttcgtggtcgtgccgctcgtcgtgttcgccctgagtcgcccggtggccttcgacccgtcgctgctggtcggcgtgctgctggtgctgctgtgtccctgcgtggactacgtcatggtgttcacgcgcctgggtggcggtgacgcgggacgcctggtggccgcctcgcccgtgcagatgctgctgcagatggtgctgttgccgttgttcctgtggttgttcgcgggcggggcggtggtggctgcgatccattgggcgcccttcgcgcgggccttcctcctgctcatcgtggtgccgctggtgttgtcggtgctcacccagcaactggcccggcgtcagggggctgcccgggtggtgatgcgggcgatggagtcagccatggtgcccctgatgatgggcaccctgatggtggtcgtggcctcccagttcggccatgtggccgcccagttcgggctgctggtgcgggtggttccgctgttcgtgggtttcctggtggtgatgcccgtgcttgccaacctgatcggacgcctcggcggccagcccgtggtgatccgtcgcacgttggcattcaccgggtcgacccgcaactcgctggtcgtcctgcccctggcgctcgcactgccgccggagatggccctggccgcgtcggtggtggtcacccagacgctggtagaactgctcggcatggtcaccttcgtccgcgtgatcccgcggctcatccggcaacgtcctggcccggggcggggtgctccgggccaggacgtgcgggcaatcggtgggtgaaccgatcgctgggtgaaccaagctggatgaaccaagctggatgaaccgatcggtgggggggctggtctgatggcggggacgctcagatcgtgaagccgctccatagcagcagggccagcaccaggccgaccaccaggttcaccgtgaaggccgagccgaacacggccaccggccgccaaccggcctgcttgatcgaggagatgttgaactccagcccgatgctgacgaaggcgaagatcaggaaccaggtgcgcaggttgttggccaccccgatggcggccttcgagacctcagcgggaaccgcaccggcatagatcgtcgcagccaccgaggcggccaggaaccccaggacgaacttggggaagcgattccagaacaccctcgccgtcggccgggggctgccctcggtgcgctccaccttgaaggtgaaatacacggtgagggcgatggctgccacgcccaacaacgcattctgcgttgacttgacgatcgccgcgatctgcagcggaccctcgccggccagggtgccggccgcggtcaccgccgccgtcgtgtcgatgttgccgccgatccatgcaccggtcacggccgggctgagccccagcaccccggccagccagggcagcaggaagatcgagggcagggcgaacaggatcaccaggctggccgtataggccaggtgttccttcttggccttcaccgcgccggcggccgcgatggctgccgagacaccgcaaatggaggcggcggacgacaggagtgcccggagtcggtcgtccaggccgaacttgccaccgatccaccaggtggcgaagaacaccgagctgatcaacagcacggcctgggccacggcgggaccagcggcccgcacgatcaccgagaagttgatcgatgcgcccagcaacaccagtccggtcttgatgaggaactccgtgcggaatcctcccgaggggcgttcgcgcacatgcagggcgctgagcaggccgttgccggcgagcccgacgatgattgcgtacaccgggaactcgatggacccggcgaccttcccgaagccggtgcccttcgtccaggcgggcactccttcgctcaggatgccgaccagcacgccgagcgcgatgacgatggcgaagccgccaacggcccagccgagtcggcccacggcggattcatcatccgatggtccgagcagggcggcgtcgcgggccggcagctcgatggccccgacgtgcggttcgacgcggctcatgggatgagtcccgccgggatcacgccggtgagggcgagggcgagcaacacgaggccgacgaccacggccaaccagtcctcgctgaccgagaacttgccggcgccgtcgggatcgtcgggcgagcggtgggtggattccgcagattgtgcgggggtgggtgaaaatgacatgggaatctccatgaatgtggggtggattgaatcatgagcggagtgcgtgcgcaggcgcggtcaattccaacggaactccctgattacccttgcgaaggaattccggatttcaccgacgtgctggctcccaccagcgtgatggtcggtacggggcagtgccacgcccggagccgggcccacgggagtggttcccgcgaaggcatcgccggaggtggttcacgcggggatttgcgtgcccgcaggcgcgcgacgagcaggtcttccgccggatcagcggttcagcagatcaacagcaggaaacggtgctcggggcgcaacaacagcgctcaagcggcgtcgcgcagacggcgagaccgcggcgggcaggcgagttcatgaatgaaatataagcaggaaatagcggggcgcgtcaaatgtccacgattcaggcgcagaattcgtgatcatattggtcgaccgtcgtgcggaaggcagtgccgccggaacgcgccagcagctagagacgcgccagcagctagagacgtgccaagagttcgcgtgctgcggccgccgggtcatcggcgccggtgagtgcacgcaccaccacgatccgggtcgctccggcgtcggtcacctgcgccaggttctgggcattgaccccaccgatgccgaaccagggcttgtcgtcggcctgttgggccaccgcgcgtactgcatccacgccgactccggggcgtccctgcttggtgggggtggcccatacgggtccgatgcagtagtagtcggtgtcggcaagccgcgcctcacgtgcctggtccacagaatgggtcgagcgtccgatgagcacctcgcgccccaccacctgccgggtttcagccaccggaaggtcgtcctggccgacatgcacgatgtcggcatcgctgacggcggcaatgtcggcccggtcgttcaccgcgaacagggcatcgtggcgcagcgccgcgtcgcgcaacaccgccaggaagcgcagctcggacagggcgtcgatgtgcttgtcacgcagctggatgatgtcgaccccaccggcgtaggcggcttcgacgaaggcggcgaaatcgtccagtgatcccctggaatcggtgcacaggtacagccgtgaacgccccaggcgcccgagccgccattgacggttgcgtgaagtcatggtgacgagtgtacgaaccggccttccgttaccgcgagcagcgtccccacgcggcccgaaccggggtacggttttgccgttgcaagccagcagctcctcgtcgcgcccgcgcaaccatggtggttgggccccgacgagcactgttcatccacatcgaaatggggcggtcaggaatatggccaagcacgtgattgtcatcggagccggcgtggtgggtctcgcctgcgcctggaggctgaggcgtcgcggccatcgcgtcaccctgctcgacccctccccggcctccggcgcaagccatgccgcggccggcatgctggctgccgtcagcgagtactacttcgaggaggaatcgctgctggcgctgtcgctgcccgcttcgcgcctttacccgcagatcatcgccgagctggcccgacgcaccggcggccccacgggcttccgtgacattcccacgatcgtcgccaccgccgattcggccgatcgtgagcgcctggagcaccttggtgaccagcagcgcagcattggcctgaccgtcaccgcgctcaccccgtcgaaggcccgcgagatggagtcgttcttctcgccgcgcatctccggcgccttcctggccgaggatgaccgccaggtgaacccgcgggtgctcgccggcgcctacctgtccgacctggaggccgacgagggctgcgacgtgcgcccgctggccgctaccgagctgctgtggcgcgacggcgccgtcgtgggggtccgcgcggccgcggtgcccggtgccgaggtgttcacccaccgcttcgatgagcgggctgtcgacaccgacgagatgaccggcgacgcgccgtcgtggtcgtcggaggacctcccggccggtgacagcatcgatatcgctgccgatctcgtggtggttgccaatggcctgctgagccccaccctcgccggcctgcccgaaggactggaatggcccatcaggccggtctacggggacgtgatcaggctgcgtacccccgagcatctgcgtccgctgctcacccgcaccgtgcggagactggtgcatgggcgcagcgtgtacatcgtgccgcgtgaggacggcacgatcgtgatcggtgccaccgaacgtgaggacggccgcgacgccgtgctggggggcggagtgctgcaactgctgcgcgacgcccaggacctggtgcccgcggtcgcggagctcgaactcgtggaggccacggcacgtccccgccccggcacccccgacaacgcgccgatcctggggccgatcgcccccgggctcatcgccgataccggcacctatcgccacggcatcctgctcagcgcgcagaccgccgtggtggtcgctgacttcgtcgacggcacggccggccaggacgaatgggccgcctttgatccatggcgctggtcgaagcaggaggcccgggcatgagggtgaccatcaatggcgaggccacgcaggtcgacgccgataccgtcgccgcactggtgacccagcgcaccggtcgcgcactttccccggacggcacgcccgccgacggcggacgcctggggctggccgtcgccgtgaacgacgaggtggttccccgccgcaactggcaggccacggcgctgaccgagggcgccaccatcgagatcgtcaccgcaacccaggggggctaggaatgagtgccagcacactgtcatcaaccacgcaatcatcaaccacgcaatccaccgaacaggccgaccggcccctggtgatcgccgggcgtgaattcggttcacggctgatcatgggcaccggtggcatgcgcagccttgagtcgctcgacgaggccctggtggcctccggcacggaactgaccaccgtcgccatgcgccgtcacaagccaaccgccggacccaacatcttcgacaccatcaccggccacggcattgccgtgctgcccaacaccgcagggtgccagaccgtgcgcgaggccgtcatggtggcccaactggcccgcgaggcactggacaccaccctggtgaagctggagatcatcgccgacgaccagacgctgctgcccgatgccaccgagtgcctgcacgccaccgagcaactcgtggcagacggcttcacggtgcttgtctacaccagcgacgatccggtggcggcccgccgactcgaggacgcgggggcctcggccgtgatgccgctgggttcgccgatcggcaccggcatgggcatcctcaacccctacaacatccgcaccatctgcgagagcctgtcggtgccggtgatcctggacgccggcatcggcactgcctcggacgccgccctggcgatggaactcggctgcgacggcgtgctgctggccagcgcggtgacccgcgccgaccatcccgccgtcatggcgcgttccttccggctggccgtcgaggcgggtcggctggcccatctgggcggacgcatcccgcgccgtgaggaagccctggcctcctcacccatggaggggcggcccgacctgtgagcagcgcggtgacactgccggtcgaaccgaccgaacgggaactcacccgcgaggaactcgaccggtattcgcggcagatgatcctgcccggattcggcatgacggcgcagcgtcggttggcgaacgcccgggtggcagtggtgggcgcaggtggcctgggttcacccctactgatctacttggccgccgccggggtgggggagttgacgctgatcgacaacgacaccgtcgacgtgtcgaacctccaccgacaggtgatccactccaccgcatcggtgggccggcccaaggtcgagtcggctgccgaggcgatcgcccgcctcaatccgcatgtgcgggtggaagcgcgggcggaacggctggacatcgacaatgtgctcgaactgcttgacgggcacgacctggtgatcgacggggtcgacaacttcgagacccgctatctcatcgccgatgcctgcgaaatcctgggcctgcccgaggtgtggggctcagtgctgcgctacgagggacaggtggcggtgttctggtcgggtcacgggcccgccctgcgcgatctgttccctgaaccacccgaggccggatcggtgccgtcgtgcgccgagggcggggtgctgggagtgctgcccgggcagatcggcatggccatggccaatgaggcgatcaagctgatcaccggcgtgggcgaacccttgctgggtcggctcgcgatcctggacgccgcccggggctcatggcgggagctgcgcatcgcgcccgatcccgatcgggtgccggtgagcgggctcagcctcgaggcggtgtcgtgcctgatgccgatcgccgttgccggagcagcccatgacgatcccgcattggccgtcagcgccccgcagctgcaggagatcttgcaggcccgcgcccgcggggacctggacttcgacctggtcgacatccgccaacccgaggaatactcggtgggccacatcgagggctcgcgcctcgtgcccatgggcacgatctcggtggaccctgcgcccccggaccccgcgcccacggacccgggcgtcccggatcaggtcgccctgccccgggatcgcgacatcgtcatcacctgccgctcgggggcccgcagcggcaggctgctcgaccggctggtggccgccggctatggccgcgtcaagcagctggacgggggcgtgatcgcctggcagcgcgaggtggaccccagcatgggggtgtgaccccagcatgggggtgtgagccgcaccggcatggtgcagctcacacccggtatcggggggtgggtcgtcagatgtttgcccccagccccaggaagatgcccgcgaagaccaccgccatgatcaccaccgtggcgaacaggccgagcagcaccggacgtgcacccagcttcatcagcgacttaacatgcacgcccaggccgagggcgaacatcgccgtggccaacaggaactgctgtacgagcttgacgccgcccagcaccggcgccggcacgatgccgatggaggccaccaggatcatgacgatgaatccgaccacgaacagcggcatgagggccggacgcttctgacccggcacgcgcgtggcacagtggttgcgcaacagtgacactccggccaccaccggcgccatcagggacaccctggcaagcttcaccgtgacggccacggccaacaagggcccgccgccggcgatcccggcagccgcgaccacctgggccacttcgtgggtggatgcgccgatcagcgtgccggcgtcccccggcccgaagcccagcagcgcggccagccccgcggtggccgggatcatgagcgtgccgtagagcaccaccagggccacggcagcggccaccttctcttcgctggcccggatcgtgccctgcatcccggccacggcagcggctccgcagatggagaagccggcggcaatcagggtgtacatgtcgcggtccatcctgagcagcctgcccatggccagcgtcgaacagaaggtgatggccaccgcgcaggtgacgatcaccagcacgccgggtccgagcccgatgatggtcggaatggaaacctgcaggccgagcagcaccacgccccagcgcagcacccgcttggcggccagcgcgatgccgggctccagggcggcgtggatcggcaccacattgcgcagcacgatgcccgccaggatcgccaccagcatggggctcaggctcggcaccaccgaacccaacgcgagcacggccaggccgacggcggcgcacaatcccagtccgggccagaagtcgcgtgagacgcgcgatcgcctgcccggccccggggcgtccgccagctctgcggccagtggtggttcgatgtcgagcacttcgcttgattggttgtccacgagtcacatgtctacgggggttggccaccctgctcgatggatccccgcatcaggtcatacactttttgcatgaccactgacggggcgacccatccactcgatcgcagcctcacccccgccgtgctgcgcctgttggtgttggtggaggacctcggcggagtgggggcggcggcccgggcctgcggcgtcagtcagcccagcgcctcacgggcgttggccggcgtggaggggcgattgggttgcctgttgttgcgacgcaccgcgttgggatcgtcgctcaccccggaggggctggcgctggctgcgcaggcgcgcctggtgctcaaggcctacgaccagttggagtcgctggcccatgacctgtcgcggggcacgcccgggcatgtgcgccttgccgccagccgcaccgtgggggagcaactcgtaccgggttggttgggtgcactggcagggcagcggggtgacctgcaggtgtcgttccacgtggggaattccgatgcggtgatccagcaggtgcgtgccggtgaggtgccgttgggcttcgtcgaggtgccaaccccgccggtgggtctggcccacgagatcctgctctatgaccggctggtggtgatcgcgccgccgaaccatctctgggtggggcgtccggtcggcctggacgacctggccgccgcgcacctcgtggagcgcgaacccgggtcgggaacgcgttccatggtggatacggtgctgccgcaccgggcaagcccggcagcggagttcgattcgaacacggccatcgtgcgtgccgtcgcggccggcctcggaccggcggtgctcagcgaactcacgatcggtgagaatgcccgcaccggggacgtcgtcgtggtgccctgggcgcacgatccgccgaagcggccattgtgcgccatctggcagagcgccctgacgtcgtcgcgcctggtgcgtgacatcctcaccgtcgtgcgtgccgacattgctcaggctgactgaccctcagcagcagccggtcgacacattctgttcatcgaagtcggcccgccaccgccagaactcccgggcgctcatcggcgcgtggtcgggatgctcacgctcatggcgttcgacgtagtggtcgtaggccgattctccggtgaagtcgcgccacagctcacgccagcccgccagtgtgtcggcgagccggcgcaggcggtgagcagtgtcaatgctcatggcgtgccttctcctcggcgatgcgctcggtcttcttcaggccgggaatcaatgccggatcacccacctcgtggtattcggccaccagcttcttgtcgagcttggaggcgaacaagccgccgggggcgaagaagttcgactcctggtgcggatcctccgaggtggtcgtgtcaccggtgcgcaataccttcaccacgcggatgatcgcgcagatcagcacgaacaccaccgccgccaggaaggcgatggacagggttccctgaatgaaggtattgcggatgatggccttctggatctcgatcttggccggatcggtcagcgttgtcagcagctggcgggcattgcgccactgctgccaatagcccaccagtggatcggtggagaagatcttctcccacgacgcggtgaaggtgaccgcggcgtcgaacaggaagggcaccagcggaatccacacgtacttcttgtagcccttgcgaatcaccatgacggtgcacaacaacagggccacggcggcaatcaactggttcgcgatgccgaacagcggatacaacgtctggatgccgccacgcggatcggtgacgcccatcagcagcagggagccccaggcagccaccaccagggcggtactgctccaggcacccacgcgccacgagggatccttgaacttcttgaaggcattgcccagggcgtccgatacctggaagcgggccactcgggtcaccgcgtccactgcggacaggatgaacagcgcctcgaacatgatggcgaagtggtaccagaagcccatcatcgtcttgccgccgccgatctggtgcaggatgtgcgccatgccggtggccagggtcggggcgccgccggtgcgcgagaccacggagggctcgcccacgtcgttggccacctgcttcagggcgtcagcaccgtagtagaccttgtcgttgccgttctcgtcccacgagtcccaggtggcctggatcttgttgccatgggcatcggtgacgccgaggttcccgacggcctcggccgtgatctgctcgcggttgccgtcggcggcctgcaccacggcggggccggccagcttgtcgacggtggcctcagaggtgttcatgccgaagtagacgccctggttgagcgacacggccgcggccagcgccatgatggccacgaacgactccatgagcatgccgccgtagccgatcatgcgggtttgtgattccttctggatcatcttcggggtggtgcccgacgagaccatggcatgcatgcccgacagggccccacaggcgatggtgatgaacaggaaggggaacagcttgccggcgaacacggggccggcggtgttggaggcgaattcggtgacggccggcatctcgacgatgggccgcacgatgatgatgcccagggccagcaccacgatggtgccgaccttcatgaaggtggacaggtagtcgcgcggggtgagcagcacccacaccggcaacaccgcggcgaagaagccgtagacgatcatcgcccacaccagtgcggtgggcgacaggtgcaggtacttgccgaaggcggaggtggagacccagcgcccggcaatgatcacgccgatcagcagcgcgcagccgacgatggacacctgggtgatcttgcccggcgagatgtagcgcagccacaggcccatgccgactgcgatcgggatggtgcaacccaccgagaacacgccccagggggaggcggccagggcattcacgcagaccatggcgagcacggcgagcacgatcatgagcatcaccagcacggcgatggttgccacggtgccgccgatccggccgatctcatcggtggccatctggcccagtgagcggccgccgcggcgcatcgagaagaacagcacgagcatgtcctgcacggcaccggcgacgcagacgccgaggatgatccacagggtgccgggcaggtagcccatctgggccgcgagcaccggaccgaccagcggaccggcaccggcgatggccgcgaagtggtggccatagagcaccacccggttggtggggtcgaagtccttgccattgttgatgcgctcggccggcgtggcattcgtgtcgtcggggcgcatgatcttgcgttggatatacaggccgtagaaccggtaggcaatggcataggtacacacggcggtgaccacgaaccagatcgtgttcacttcctcaccgcgcacgatggcgagcattgtccaaccgagcactccaagggccgtgatcaccacccacacgatgaccttccggaccgtccatttgttatgcggcttgacgccgatgggtacacccgccttattgcggatgatgagcttctcttcctccggtgtgtaggaaggcagcccttctttgacagctgctgacatgttgttctctcgtctttgggaggtgcatggatggcatgaagccgttgacgcagtcagcataggaaaatgggggttcattcggggtctgtccatgagaatcatcagggatggaaccagaatggatcaatcgcaaccagaatgtgcaccggggaggggagcgcggcctgtcccggcccgcgcggccgcgctgtggcccatgatggatagggacgggtgccgcgccagtggtggtgcggcgattgccggcacgactgacacggtgcggtggccgtggccggaaccgtcaggacgcacagctcaggcaggacgcacagctcaggcaagaaactcaggtcaggcaagaaacacaggtcaggaaggtgggatgaagatgtcccggatcatcatttccccggattcgttcaagggaaccatcagtggcgaggacgccgccgcggcactcggcgcgggctgggcccgggtgcgacccgacgatgaagttgtcgcattgccgcaggccgatggcggcgagggcacctgtgcggtgatcgccgatgccgttcccggggcccggtggatgtccactcccgagccggtcaccggacccgatggacgtccggtgcccggccgctgggtggtgctgccctccggcgaggcaatcgtggaattggcgatcccctcgggcctcacgctcatggcggccaaggacccgcgcggggcccacacccgcggcctggggcaggtgctgcgggcagcggtcgcggcaggtgccgaccgaatctcggtgggcctgggcggttcggcgtccaccgacggcggcgtgggggccatgcgggagctcggcgtgcgattcctgaccgccgacggcaccgagatcggcgacgggggagccggcctggctgatttggcgtccatcgatcgctcggcgatggtggccccgccagcaggtggcgtgcgcctgctgtgcgatgtgcgcagccccctgacgggccccgagggttccgcggccgtcttcgggccccagaagggcgccacgcccgcgggcgttgcctatctggacgctgccctggcccacctggccgaggtcagcgggggcgacgcggacttcccgggcaccggcgctgccgggggcactgccttcgggctgatgagcctgtggggcgcgtccatcgtctcgggggccgaggaagtggccaggctcaccgggctcgcggatgccctggctcgcgccgacctggccctcaccggtgagggctccttcgacgtctcgtcgctggccggcaaggcggtggcggccatcatcgatgccgcagccgccagcgggaccccctgcgtggtggttgccggcgggttcaccgatgagggtcgtgccgccctgacccagcgcggcatcgggttcctcagcctgaccgagctggccggctcctccggggaggccatggcccaccctgcccgctacctcggggaggccggtgcgcggatggcgcagcagttctctcattgagcaatgcccacgccggtggctacgggaccggcagcaccgtcggcgcctccggaagggccgggatcagccgcgttgcgccgcgcgcctgaccatgagcgagccgatcaggccgaggaccagcatcgcggcggcgatgcccatggaccactgggccgcccgtgagaatccctgggccatcacctcggcaacgcgcggtcccagctccccgagctgcccgtggccgccctgtgcggcgacggtagcgatcgagccccctgcggagccccgcagcgagtcgacgagccccgacaccgcagccgctggcatgccggggatggccgacagcaggccgggcacgatcctgcccagcgccaccgacagggccgtgccggagatggccgcgcccagtgcagatccgagttggcgcaccgtcgattgggttgccgatccttcgcccgactgggccaccggcaccctgcccagcaccaggctggtcagttgggcggaggccagtcccagtccgaccccgtagatgatcagggtgccggcgaaccacaacggcgacatcgagggcttcatgatggtcaccgagatggccacgccgatgatctcgagcagcaaccccagctgcaccacccgcgcggcccccagcgcggcggcgagtttgcgggccagggcacccgagaccatggcgcccaaggccatcgccatgagcaccagcccggcccggatcgtcgacaggcccacggcgttcaccaggtagagcggcagcacgaagaccagcgcgaactcaccggccgataccgccccggccgtcagattgccccacgagaacgacgggatcgagaacaggcgcatgtcgagcgtcacggccttgtgccgggcgccgcgcaggcgctcgaccacgacgaacgccacgatcagtgccgcgccgacgaacaacgccaccggcgtcaccgagactgcccacccggtgggccattcaatgccggccaccgagaacggcgccgtggggctccaccatccataggtgttcccctcgatgaggccaaagacgaacagcgccgcgcccagtgaggccaggacggtgccgggcacgtcgaggaaggacaacggaccacgaccccgccggcgggacgccccggtcggatcggaggcacccggcagggccgatgccccgccggtgtgcgggacgaacttcagtcccaacgccacgatcacgatgcccaccggaatgttgaccaggaagatccaccgccagccgatggtctcggtgaagatgccgccgagcaatggacccagggcggcggcgcccgacatcacggcaccccagacgccgaaggcggcggcccggtcccggccgcggaacgaggccgacacgatcgacagggtggagggcatgatcatggccgcgccgatggcctgcaccgtgcggctggcgagcaggggagcggcggcgcccgacagggcggccaggccggatccagccatgaacacgacgatgccgatgaggaacaacgccttgcggcccttctcgtcaccgagcttgcccaagggcagcagcagcgccgccaacacgatgttgtacagcgaggtgacccattgcgcatcggtcaggctgatgccgatcgagtcgatgatcgtcggcatcgccacggacacgatggtgccgtccagcacgatgatcgccaggccggcggccaacacccacagggccttccagggcggtgcggtgggcgatccgccgggagcatcgcggtgcgaatccgccgcgggcccctcgagggcgcgtgacgcccgctcacctgccgtcaggtcgtcaccggtggcggcgattcctcgttcggccctcatgacagcaccttgtcttccgggtcttccaggtggttttccacgtggtttcccgggtggttccaggggtcgcacgcgaagccgtgccgggctcggcggggtccatgggctcgatggggactgcgcggttcgagacaccctgtcgcaaacatgatgcgactatatgtcgcgatcccggaatccgacaaggcccacctgtcggcctcagaagtcggcgatgacgagcttcttcatcgcgagcatcttctggtaggcgccgggccgggccatgagctcctccatcgccgcgggcaccacctgccagctgacgccgaatcggtccttgcaccagccgcactgctcggcctcgggcactgctgacagggcctgccagaagtggtcgatctcggcctggtcagcgcactgcacggtcaggctcacggcctcgttgaagtcgaacccttcgggcaactgtgcgcccgaatccatcgcgctgaaccattggccggccagttggaagtcggagaacaggatcgtgccgtccggttggccctggtcgggctggtagccgacgaccgtgccctgccgtgcgtcggggaacacgctcgtccagtactgcaacgcctcgtgggcccgggcggagcggtaggggaacatgaactgcgggatgacgaacggacgcggctcgccggcggggtcggtgagcatcagctgccagttcaccccgaaacggtcctgcaaccacccgtagcgggccgaccagtcgtaactgtcgaggtccatcagcgccgaaccgccgtcgatgaggcgcgcccacagggcatccagccggtcgcgggcgtcgggcatggtggacgggtcgaagttgagcatgaacgagatcgacgggttgatcgcgaattccggcccggcgttgatcgcgctgaactcgaagccgtcgatggagaagccgatctccagcacctcgccggcgaactcctgctggaagtcgggtagtccctcggccgggtagtgggcgatgtgggtctggcgggcgtcggggaaaacgtcgaggtagaagtcgaccgccccgcgcgccacgtggtcgaaccacagtgacggaatgatgacttggctcatgcgccgacgttacaggccgcgatgtcgcggtatcagggcgggcaccggatgctgggcggacgtgggggtcgcggctgcggtgccgggatagcgtggccgggtgagcgtcgattccttccatgtgccccatcccgagcccggcggcgtcatgccgtgggcgatgcagctggtggtctaccgtgaccgccacgaacccgcgcgtcaggtggatgtctgcgaggccacggcccgggccgtggtggccctgctggacgatgcgcgctccgccgagggtggcccctggcatgacgcggtgcagcactgggtcggcgggcacatccgcaagctcgtccgtcgtgcggacggcaagcggtgggacgatgtgcagctgctcgagggggtcagcgtcgaacaggcgggccccgcggacttcggtgtcgcggcggcgcgggccttcgtccccgggcccgaggaaccgcagccgaaggccatcgacaagctgcagatcgccggcaccaacttccccgacgagggcgtgagcctgtcggtggatgcgctggccgtggtggaggtcagcccgttggtcgagatgaccagcgggaagatggcggcccagtgcgcccatgccgcgcagcgcctctatgagtcggccggaacagatggtgacccggaatcgacccgtgcctcctggcgcgccgacggcttccgactccaggtggacttccccagcgtcgagcagtggcaccgcaccccgcgtccggtgagcatcatcgatgcgggattcaccgaactcggcgggctcaccgagaccacgcgcgcctattggcggcactgacccgccgggcgacggatcacgaacagggaggaaaaccatgagattgccacgacgtgccgtcctgggggcgattggacttgcgaccctggccgcctgctcacgcaatgaccccattggtgccagctcatcggccagccggacgggcctggtggtcggctcgcagcagtactactcgaacgagatcatcgccgagtgctacgcccaggtgctcgaggccagcggcatcgccgtgacgcgccagttcgagatcgggcagcgcgaggtgtacatcgacgagatgacctcgggcaagatcgacctgatccccgaatactcggggaacctgctgcagtacttcaacaaggacacccaggtgaccgaccgcgacgccgtgcgcgaggcggtggtgaaggcactgcccgccagcctgcatgtgctcgaccaggccgacgccggcgaccaggattcctacacggtcaccagggcatccgcgcaggagcattccatgtcgtccatcggcgacctggcggccctgggcaccaccatcacggtggccgcgaattcggagttcgcgacgcggccctacggtcccaccggcctgaagaggctctacggggtggacgccacggtgctcggggtggaggactccggaggccccctgacggtgaaggcgctgctcgacggcaaggtgcaggcggccgacatctacaccgccgatccctcgattgccagcaacgacctggtggtgctgtccgatccgaagcacctcatcctggcgcagaatgtgacgcccctcgcctcggcgcgggttgacgctgcggccgccgcggccatcaacaaggtgagcgcccagctgggccagtcggagctgcagtcgttgaactcccagagcgtgaccaagcagttgaaggccgccgacatcgccagggagtggctgcgcgcgaagtcgctcgtctgaccgcgacaggactcggacagatcggcataaggccttgtcaggggcgatgcgctggtggcgaaaagttcccgaatggtgagatcgggggcatgatggccggggccccgacggttgaccagctggcgttctggcccagaaggagcatccatgtcgaatgtgacatccactatcgagactgaaccgacgttgaatcccagccatcggatccgacgccacctgcccgtgtggttggcggtggtggcggtcattgtcctggcagtgaacctgcgtccgggcgcgacctcgatcggcccgttgctcagcgaactgcgtgccgggctgcacatgggcccgggcgtggcggcgctgctgagtgcgatgccacccttctgcttcgccatcatcggcgccttcgccgcccgcatcggcggacgcttcggcaccacccgcaccctggccgtcgccgccctggtgatcaccggggggctcctgggccgggtgctggtgcacggcgagatgagcttcctggcgctcagcgtgctcgcgctggccggcatggcggtcggcaatgtgctggccccggtgttcgtcaagcgcttcttccccgggcatgtggccggcatgatgtcggtgtacaccaccgtgctgccgatcggtgccctggcgccgagcctgctcgtgccggtgatcttcgcgtcccatccgggtaactggcagctcaacctgggtgtgtggggtgccacggccgccgtcgcgttggtggtgtgggtggtggtcgccgccatcgcgccccatgccggacacatgcgtgacatggccgagggcgccgtgcagcgcaagggtccgacgatgtgggagatcgcgcgcacccgcaaggggctggcgctcggactgttcttcggactgcagtccatgcaggcctatgtgtccttcgggtggttgccgcagatcttccgggacgccggcctgtcggtggcccaggcgagcctgttgctgtcgctgttcaacgtgattgccattcccggcgggctggtgatgcccatcgtcgcccagaagctgacgcggcccaccggcatgatcgtggtgctgggtatcctgctggccggcggctatgtcgggctgttgctcgccccggccgcgctgccgtggttgtggacgatcatgctctcgctgtcgggctgggccttcccgctggccattgccctggtggccgaacgcagccgcgatccgctggtgaccgcgcagctgtccgggttctcccaggccctcggctatctgattgccggcgtcggcacctggctcgtgggcgccgtgcacggaatcaccaacgggtggaccgtgccgctggtggccctgatcatcagtgccgtcctgttcgtcaccttcggcatcatcgcctcggcgcgcggtgacgtcgacgacgagctgccggcattcgcccgctgagcccggacgtcatcccccggccttggtcgggggagtctgatctgcacgagatgtgacatgacggtcgcagcccggcccacttggccgggctgcgaccgtccctcacgtcgtgggctggtcgtcccccttgttctttcgtgccggtggacgccccggtttccggatgggcttcacgtccttcggcagtcgccccgcgcgccgcagcgcgtcgcggaggaccatctccatctgcgcgttggtcgaccgtagttcgtcattggcccactgctgcagtgcgtcgtgcacggcagggtcaagtcgcagcaggagcgtcttgcgctcactcatggcgccagcggatcagttgtagagcgttccggcgttgaccaccggggtagcgcgggagtcggagcacagcaccacgagcaggttcgacaccatggcggccttgcgctcatcgtcgagtgccacgatgtcctgctcctccagctggttgagggcgttctgcaccatggtcacggcgccctcgacgatcttctcgcgcgcggcgatcaccgccgaggcctgctggcgttgcagcatggcctgggcgatctcgggggcgtaggccagcgagctgatgcgggcctcgatcacctcaaggccggcgatggcgatgcgggcggccacctcggcagccagctcgtcggccaccttctcggtggccccgcgcagcgtctcggcgccgggctccccattgtcatagggatgggcgcccgcgatgtggcgcagcgccgactctgactgcacggccacgaactcgtgggcattctccacggcgaacaccgacttggcggtgtcggccacctgccacacgatgatggcggcgatgttgaccggattgccctcggagtcgttgaccttcagctcgttggtctcgaagttgttcaccttgaccgacaccttgcggcgggtggtgagcggcacggtcatcaccagaccggtgcgtcgcaccgtgccgatgtaggcaccgaagaactgcaccacgcgggtctggccggggctgatcaccgccaggccactgaacagcagcaggccgatgacggccagcaccacgcccagcggtgcgctgaattctggcatgtcctcggccaggaagagccaggcaccaacggccagcagcgctagggcgatgaggatcccgggcagcccggtgatggcccaggccctgcgttcgttgatgtcgacgcggcttccctcgcgtcctactggatggccggcgggggagtgcaccagggcatcgtccggtagtggcgtgcccgaggcgtcaggggactgaggagtggtcatggtggaatcctctcaatgtgataccaaagtgatatcatattatctgggaggttggggccctgccatgacgatggtgggcggacgggtgccggaacgcgcaaggacgccgcgtccgcgggcgggtgacttccctcggagacggcgtccttgtgggccggcagggccggggtgacggacctgtcagtggtgattatgtgtgcgttggggccgggctgtcgctcagagctcgacgtcctcgtgcacggtgagctcggggaactggccgagggcggtggacaggtagcggtcgcccgaatcggggagcagggccacgatgcgcttgcccttgtactcgtcgcgggcggcgatctgcagggcggcggtcagggcagcaccggagctgatgcccacgaagatgccctcggcggtgccgagcaggcgggcctgggcgatggagtcctcgtcggtgatgcccacaacctcgtcgtagaccgaacggtcaagcgtgttggggacgaagccggtgccaatgccctggattccgtgcgggccgggcttgccaccctcgaggatcgggctcttggcgggctcgatgccgatcaccttgaggtcgggcttctgttccttcaggtacttgccggcgcccgacagggtgccgccggtgccgattccggcaatgaagacgtcgacggtgccgtcggtgtccttccagatctccgggccggtggtcttgtagtggatctccgggttggccgggttgtcgaactggccgaggatcaccgaggaggggtcggcgtcgtgcagctgctcggcgtaggcgatggagcccttgatggccagcggtccgggggtgaggatgacctcgccgccgtaggcctggatcagcgcgcggcgctcaaccgacaggctggcgggaagcacgaccttcaccttgtagccgcgggcggtgcccacggcggccaggccgatgccggtgttgcccgagctgggctcgatgatggtgccgccgggcttcaggacgccgcgcttctcggcgtcggtaatcattgccagggcaatgcggtccttcaccgaaccggccgggttgaagtactccagcttgagggcgatgtcggcatcaggggcgccggctgccttcaggtaatggggtgcgcgcaccagcggcgtgttgaagatgagttcggtgatggaatcgtggattgcagacatgcgagggcctttcgaatgagggaatagcttttgatgaaagagagttttccgtcaattgctgtgacggcgcagtgaagagcttgagaggccttcgcgccgcactgtcacgagagttcgggtgtgcaagcacgccggctctgacaggggagttgggaggcccgcccggctaacgcagaagtttgggagtatgaccgcacaaagctgcgccggactagcggcaacagagacaacacatcatcgcgacggcatcgcgcgacgacgtcgcgtggctcaggtcgggagtgctgttcacgtgaataaacatagctgtcgaattgccatatgccaaaccggttcaaattgcggacaaggcgggccggtggtcccgcattgacgccgcggcgccccgggcggcggacacgcaatgggaggccaccgggcgtcgacgccgaccctggcggcacaatgaatcccatggtggacaagcagggcgatgggccggcgcgatggtccgatgttctgccgcgtgcccgttcccggcccttcgaccggccgtcgcgtccgtccgggcgtccccggatggtcgggctgctggtgcactcgctggctgagcgtcagggtgccatcgtcgactcggtgcaggccgtgtgccgggaggtgggggcgcggttgctggtgcggcacacctcccgggccgagcccgggcgcgcacaggtgctgcagttcctggacgccggggccgacacggtggtcgtggccggcggcgacgggacggtgcgcttggccgccggggtgctggccggtgccggcgccaaccagtgcaccctgggcatccttgccgcgggctcgggcaatgtgctcgcctcggcgctgggtcttcgccggggatcggtgagcggtcgtgcgcgggtcgccgtgctgggcgacctggcagacctggacgtcgggttggccagctgttgggatgagcacgggcaacccgtggcgccacaacccttctgcaccatggtcggcatggggcgcgatgccctgtcggtgcagtcaacccatcggcgcaccaagcgggtgctggggcccctggcctatggggtggcgggcctggggcagcttccccgtcgcggcttcgagatgtcgtggcgcaccgacgacacgccctggcggcgggggcgctattggtcagtgttggcgacgaacacgcccctgctaccgggaatgggacccttgcgcgcgggcgcagtgctcgccgaccgggcgcgcatggacgatgggttgttggacgtggtggccacccgcccggagaaccccgggcattggatggcgattgcggcggcgggcctgctcaacacacggactgccacgcgtggcctgcagcgggcccagggggcgcgggtcaccatcgagcccgatcaacccttgcccgtgcaggccgacggcgacatcatctgcgcccgggcgcgtcagctgtcggccgaggtgggtggccatgtggcggtccatatcggcgacggtcgcctggactgagccgtgtggacggcagcggcccgaccgggtcgcccacacagagggtctgagggtcggcggagtgcacgtgccggtcgccgcgcgccgtgatcacaacgccgcagtgatgatggccgcgatctgcttcaccttctcggtgctggtggtcggcccgcagtcgatgctgaccacgtcggtgggccagcccagggaatcgggcaggtaggcgggccgtggccagctctgcggcgagaagatcccgtgccgcgccagggcgtcctcgatcgccggggccgccgccgagccgatgagtggaaagcaggcgcgccccgcattgagcacctcgaggggtgcgtcgccaagttccctggtcagtgcgcggttggcccggcgtcggcgacgggcctggcgcggtaggtcgaagatgtccagctgcgagcgggccccgtggctgatcggcaccggcatggtcgccaggtcgaacagctcctcgctgcgggcgagttgggcgaggtagtcgtcggcgagccggggcggggccgccggcaggtcggccatcgacgcactcaccggcaccggcgtgcgggcctccagcgccgccgaccgggtgagcagcgtggaccgggctgcggacaattccccgtcgaccccactgcgggtggcgggggagtcgggggtgatgccctcgcgcgaccacagcagggcgccatcggtcaccgcgacgagcttgcgcaggctggccacacgaaagtcgcaggccggcaggggccgaatggccggcgcctccgtggtcggcattgggctggttggcattgggctggttggcagcgggctggttgacagggaatcgggcagaaggtcgtccagcacggcatgggtggcgtcgtccaccacgaggtggcccccctcgcgggcacgccgcaacaccgtggtcagcgcagtatcgggagcgatcgcaccgacccgtgaccacaccaccagggccggctcatcggcgtcgtccagcgcggtgccgagtgccggcgggtcgaactgcaggttggcgcccacctccacaaagtgcacgcgcatgccctcgagccagaacggaagggccatcgtgtcgcagtggtagctgggcagcacggccagctcgatgtgctgggtgcggcaccatcgggcgatcagcgtcagggcctggcgtcccgattccagcagtatggcgcgccccggggtggtcggcgcgagccgggtgagtgcctcgtcgtgaccctgcccggatgctggctgctccatggcaggcacgctacccgctcggtgatggacgctccgggcgcggtgatggggccggtgcaaccatggctccatgagcaatgcaacgaatgcttcgacgccatccgatggcacagcggccggcaggacggcttccgatccgaccactcccgattttcgggcgatgggtgcagagctggaggcgggcctgtcgggccttcgccgtgagctgcaccagatccctgagctggaattcgacctgacgcgcacccaggcgcgcctgctgcaggccctggatggcctgcccctggagatccacacccgtgaggggtccagttcaatcattgcggtgctgcgcggtgggaggcccgggccgaccgtgctgctgcgcggcgacatggacgccctgcccgtggccgagcagaccgacgagcccttcaagtcgaccaacgggcgcatgcacgcctgtgcgcatgacctgcacatgtcgggcatggttggcgcggcggaactgttgagccgggtgcgcgacgacctggcgggctcggtgttgttcatgttccagccggccgaggagatcgccgggggcgctgccgagatgctcagccacggcctgctcgatgccgccggtgaccagccggtggtggcgtggggcatccacgaaatgccctatccgctgggcaccgtccacgtgcgcgccggcgcccagatggccagcaactgccagttgactgccaccttcaccggcctgggcggccacggctcggcgccccacacggcgatcgacccggtgccggccgtgctcgacctgggtcagcagctgcagaacctcgtgacccgcgagttctcggtcttcgacccggtggtgtgcaccaccacgcagctgagggccggcgaggcgatcaatgtgatccacgacaccgcctacctcggggccacggtgcgggccgtctccccggaggccaccgagcacttcgccaggcgcggggtggaggtggccaggtccgtggcggccacccatcgctgcaccgtcgatgccgagttcaaggtcaattgccctaccacgatgaatgatcccgtggcggcgcaggtcgtgctggacaccgcgacgcggctgttcggcgccgagcgcgtggtcgagatgaagcatccggtgatggccagcgaggacttcagctatgtgctggagaaggtgcgtggggccttcctgttcatgggggccctgtatcccggcgtcgacccggccacggctccgcagctgcattcgccgttggcccgttacgacgacgccgtgttgggcgatcaggctgccctcctcgcggcacttgcctggagcggcgcgctgcccgagtgatactcccgggaaagcgatgagggggacccgccggaatgggcgggtccccctcatcgctggtgggtcagggtgggtcagtgagttcctacttgctggcttccaccggcggctgtgccgaccaggggaagacgatccactgtgccgtgtggtgccagacgaaatcggggagcaccaccgtggtgggcttggcgtagagcactgcgctgcgtacgtcggcaccgaagccgcgcagcagcttgatcaccagctgcatcgtgcgtccggagtcgaccacatcgtcaaccaccagcaggcgcttgcccgtgatcgactcggtgtcgagcatcggcgccaggagcaccggatcgggcagcgtctgggccacgccggtgtagaactcgacgttgatcgcatcggtgagcttggttcccagtgcataggtgagcgcgccggccgggatcatgcccccgcgggccaccgcgatgatgatctcgggatcgaagtccgaatcaacgattgtctgggccagttcgcgtgatgcctcacccagcccatcccaggtgaggatttccttgtcgtgttggtcgaccgcatccgcgtgataagccgtcatgtcggaatcctatcgaggccggcgtcgcggcgcttcccgggtccgtgcggcagcggtgctcagcgctcgtccagcagcttgacgagcaggcaggcgtccagccagcggtcgaacttgcggcccacctgcggcagggtgccacacagtcggaagcccagtcgccggtggaagtcgatgctcgccgcattgtcggcgtcgatcacgcccaccatggcgtgcatcccggcgctgcgggcccggtcgatgagctggtccatgagtgctgcgccgatccccagtcgctcgtgcccgggcgccgtgtagacgctgtgttccacggtcaggtcatagccgggcagggatcggaagcggtcgtagtcggcgaagccgacgatccgtccctggccgtcggcggccaccagcaccggatggcgtgcggcatgttgccgggccagccaggcccgccggtcggggacggtgcccggcgtcagcgcatagctggccgtggtggccaccccctgcgcattgtggatggcggtgagtgcggctgcgtcgtcgttcacggcgtcgcgcacgatgaaggagatgggcacccaagcagcgtaggtccggccaggtcgggcgcggttgatcgtccccctggtggttgctgatcgcggccctgagcgaaaccgccccgcgggtttggttaccaaagctaattaacttggttaacgggttagtctggtgcctcgtgagcagacaggacaacgagaagcccgacacccacgcgcgtcgatgcggaacatcgcactcgggcgtggccgggccccacgacggcgggaccgcgcatccggcaccggcgggtgccgacgaggagctggcaaacctcgccaccgatgttcggattgcctgccaacgcattgctcgcggcattcgtcacgccagcgacgagctgcccggcccgctgatgagcgtgctcatgcagctgcaccggacagacccccagacgcccacggcactcgccgcgcacgccggggtgagcacaccggccatcacccgggtgatcaacgccctggtcgcggaggggctggtggcccgcacgccggatcccgacgatcatcgccaggtgctgatcggcctcaccgagcggggacgcggccagctgcaacgcaccctggccgcacgtgacacctggatgctgcgccggctggacggactcgacgccgatcagcgggccctgctgcgcgacgccgcccggctgctcaccgaactgaccgagggggtggtggcacggtgaatcccacccagagccgttcggctgcgttctggcacagcgtcggacgcaccttcgtgtcgctggcgcagcgcaactaccgcttctacttcaccggggccctgctcagcaatatcggcacctggatgcagcgtacgagtcaggactggctggtgctcacccagctgaccgaccgctcgtcgtcggcgttgggcatcgtcagcgccctgcagttcctggcgattccgttcctggcgcccttctcgggggccgtggccgatcgctatcccaagcggacgatcctgctgatcacccagaccctgctcgggctcaactgtgccctcctgtggctgctggtggtcaccaacaacgtggagctgtggcatgtctacgtgttcgccttcgcccagggcgttgtcgcgagcttcgacatgccggcgcgtcaggccttcgtctctgagatggtggccgactcgttgattcccaatgcggtgggcctcaactcgatgtccttcaacgccgcgcggctgatcgggccgggagctgccggcctgctcatcgcggcggtgggggtggcgccgggcatgctcatcaatgcgctcagcttcctggcgatgatcggggcgctgttggccatgaatcccgcgcaactgcacccggcgccgcagcgcaaggggcgtggctcggtgcgggaggggctcagctacatcaggcatcgccccgacatcatgctcgtgttgttcatggtgttcatgctgggcaccttcggcatgaacttccagatcaccaatgccaccatggccaccaaggtgttcggccggggcgctgccgaatacggtgcgttgggcaccatcatggccatcggcaccttcggtgcggccatcatcgcggcgcgtcgccgggccccacgggtctcggtgctgctgctggggctgggtggcttcgcgctggccgacaccttcctggcgctcgcgcccagctattggttctatgcgatcctgctgatcccgaccggtctgtgtgcgctcaccgtgatgaccagcgccaattccaccgtgcagatatccaccgccccctcgatgcggggacgggtgatggcggtctatgcggcaatcaacatgggtggcacgccgctcggcgcccccatcgtcggatgggtgggtgacgtggccgggccccgatggtcgttgctggccggatcgattgccaccggcgccgcctgtgtgatcgtcggactgtatttcttcgtgcacaagggagttcgcgtgcgcatcgaacggggacgccccctgcgcctgcatgtgtggaccaccgatgaggcaatagcggcgcagagtgccgctgagcccgagaaatagccgcgctccgcacaaggaagagtccgcgcagggaaatggtggccgtggctccgctggggaaccacggccaccggggtgggcatccggacaggccggctagagcatgagcggggcgagggcgaagcccagggccaccgctgccgcaatcgtgatgatgcccggcaagaggaagggatggttcaacacgaacttgccgattcgcgttgttcccgtgtcatccatctcgatggctgccaccaccgtcgggtaggtgggcagcacgaacagtccgctgactgccgggaacgacgccaccatggcgccgaccgatacgttcatcgccgcggccacgggcatgaaggtcacggtcgtggccccctgcgagtacaacagtgccgcgccgaagaacagcaccaccgacaacagccagggatactgctggatcacgctctgcccgaactgctgcagggcatccaggtttgccgagacgaaggtgttgccaagccatgcaacgccgaggatgcacaatgccgcgctcatgccgcccttgaaggtggactgatcggacacgcacgtcaggtcgatatggcagagcagcttggtcatcagcgctgcggtcatcatccgcacatgatggcagcggtgcggggcagtggcggattggacatgccggtgactgcggtggcatagaccatcacgaccaccagggagaccccgaagatgatcagcgagcgacgggcatagggcttgatctcgtactcggtgaccgaggtggagctcaccagcccctcggcgagtcgcttcttgtacaccggatcatcgtcgagctcgacgccctggcggcttgcgaacagcgcacccaccatggagcccacgaaggtgaccagggtgacgaaggccaccatcttcgtgtacgacaccccccggggctcgacgatggccgacatggccacggtcgcagctgagatgggtgaggcacagatcgcaatctgcgaggcgaccaccgagatcgacagcggccgggaggggcggacatgcccctccttggccacctctgcgatcaccggaagggtggcgaaggccacatttccggtgccacacaggaatgtcatgacgtaggtgatgatgggcgcatagaaggtgatccggcgcggatgccttctcaataatcgttcgctcaccttcaccagcagatccatgccgccggccgtttgcattgcggccaccgcagagatcaccgcgatgataatgcccagtacatcccaggggatgccggtggtcggattcacccgacaaccaagaaggcccaggacgatcacgccacttgcgccggcgaatgcgattcccaaaccgcccagtcgggcgccaatcagaatgaagacgagaactactgctagctgtagcgcaagcactgttctaggcctcgtgactgacgagctccggcgccacatcctcgggcagcccatgttcatcggcactgtagaagcggccggtgtagtggggcttgaggaagttctggtcggtgaggatggcgtccacctgctcaccggtgagcaagcccatctcgacgaccacttcgcgcaccgacttgccggtgcgagcggcctccttgcccaccacatcgccgttgtgatggccgatcacgtcgttgaggtaggtgacgatcccgatcgagttcaacacatagttgcggcatcgctcggcattggccgtgatgccgtcaacgcaccgggtgcgcagcgtgtcgcaggcacgggtgagcagcagcaggctttcgaacatcgcctgcgacagggcaggctccatcacattgagttcgagctggccggcctcggcggcgaagctgaccgtgacgtcgttgccgaacacgcggaagcacacctggctcaccacctcggggatcaccgggttgaccttggccggcatgatcgacgagcccgcctgcatggcgggcaggttgatctcgtcgatgcccgcacgcgggcccgacgacagcagtcgcaggtcgttgcagatcttcgacatcttggcggccaggcgcttcatggccgagtgcacggcgatgtaagccccgttgtcatagctggattccatgaggtcggcggcggcgaccaccgggtatccggtgacctccgcgagcttcatcgtcacaaccggtgcatagcccggaggggtgttcagcccggtaccgatcgccgtgccaccgaggttgatggccagcagcaggtcggccgcgatgttgatgcgcttgacctcctcgcggatgttggtgctgtagcccctgaactcctcgccgagcgtcatgggcacggcgtcctgcagctgggtgcgccccatcttgagcacatcggcgaactcgatgcccttggcggcgaagctggtctgcaggcggtcgacctcgtcggtgaggcgatgggccagggtgaacacggcaagccggaatccggtggggtacgcgtcgttggtcgactgcgacttgttgacgtggtcgttcgggttgatcaggtcatagcgacccttgggatatccgatgagctccagggcgaggttggcgatcacctcattggtgttcatattgatcgaggtgcccgcaccaccctggaatgcatcggtggggaactggtccatgcagcgcccctcgtcgaggatcgcatcgcaggccgcgacgatcgcatcggcgatgtccgccgggagcactcgcagctccttgttggccagcgcggcggccttcttcacctgcaccatgccccggatgaactccggcacatcattcatggatcgtccggacatctggaagttctccagagctcgcacggtgtgaattccgtaatacttgtcgttcggcacttcccgcttaccgagaaggtcttcttctgtacgcgtggacatgactcccccttgagttccttgtcactggcgcgtccctgtctgggaccgtcggtcaacaacgtctgtgttgtcctgacaacagtaatatttggcgtcccgggggcccaaaggggggtatctgatcgaggatcacgggatgcacgctgatatttgttgaaagttcttcatcctgcgaccctctggggggatagcgacgctatttttcgttgttgagcggcggattgaccgtaggacatgttgatgggcagtccacatgggtatgtccgataacaccaggagcccccgatacgcaagttatcgggggctcctggtgtgtgttgggtgggtcagcgctcatccagcgcccgcagtcgggcatcactgggcaggcggtggtcgtccgggccgtagaccttgccggtgtagcgcggcttgaggaagttctccggcgtcaggatggcgtccacctgttcgccggtgagcaggcccatctcgatgaccacttcgcgcactgacttgccggtgcgggcggcctccttgcccaccaggtcgccgttgtggtggccgatcacgtcgttgaggtaggtgacgataccgatcgagttcatgacgaactcacgggagcgctccacattggccgtgatgccgtcgacacagcgctcccgcagggtggcgcaggcgcgcgtcaggaggtggaccgtctcgaacatcgcctgggtcatgccgggttccatcacattgagttcgagctggccggcctcggcggcgaagcagacggtgacgtcgttgccgaagacacggaagcacacctggttgaccacctcggggatcaccggattcaccttggccggcatgatcgacgagcccgcctgcatggccggaaggttgatctcgttgatcccggcgcgggggcccgacgacagcagccgcaggtcgttgcagatcttcgacaacttggccgccaggcgcttcatggccgagtgcacggcgatataggcaccgttgtcgtaactggcctcgcgcaggtcaccggacatctccacctcgtagccggtgatgtcggcgagcttgcgggtgaccagcgcggcatagcccgggggagtgttcagcccggtaccgatcgccgtgccaccgaggttgatggccagcagcaggtcggccgcggtgctgatgcgcttgacctcctcgcggatgttgttcccataccccctgaactcctcgccgagcgtcatcggcacggcatcctgcagctgggtgcgccccatcttgagcacatcggcgaactcgatgcccttggccgcgaagctggcctggagccggtcaacctcggcgaccagcccgcgcaccagggtgaacacggccaggcggaacccggtggggtacgcgtcgttggtcgactgcgacttgttgacatcgtcattcgggttgatcaggtcatagcgacccttcgggtagccgaccagttccagcgcgaggttggcgatcacctcgttggtgttcatgttgatcgaggtgcccgcaccaccctggaaggcatcggtggggaactggtccatgcagcgtccctcgtcgaggatcgcatcgcaggccgcgacgatcgcatcggccacgtcgcccggcagcgcatggagctccttgttggccagcgcggcggccttcttcacctgcaccatgccccggatgaactccggcacgtcattcatggtgtccccggagagctggaagttctccagcgcccgcacggtgtggatcccgtagtacttgtcctcgggtacttcgcgcttgcccagcaggtccacttcgatacgtgtgctcatgccttgccttcctgattggtcgttgtccacccactgccattctgctcgccgccgccgcgcgacgggcagtccgaaccggcccccgtgcgggccggttcggccacgcgggcccgtcgtcgggtgtggctcagtcgtgcccgccgcgcgaatccaaccaccgcagccaggcgtcgatggcgcgggcctcgagctcatgtgtgcgcttgctgctccacaccaggcagtgtcgaggttcgtcccagctccaggcccccatcgtgtgcatcaaccggcacagctcgatgctctcgtcatagccgaaccgcctgtcggggccgaacggtggcaggcgcgcgagcagtgagacgtattcatggatggaaccggtggagtcggtcccatcggggtagatgatgaggaagcgcttgtgcatgtcctcggggccccattgccacacgggtccggcgggcggatccggcgacggcgggccggcgagccagccgcccatcttgcccatgatgtcgatgtcgggatgcttcagctgcgtctgccacagcgattcctgttggcgcctgatctcgtcgtggtcaaccatcgtgctcccccggttccgggccccgtcgtgggcgccgggtggcggagcggcggggcggcttgtccgatgataggcagagggagggttccgggaccctccctctgcaatcaggtccggtggcgcatcgtggtcacgccgccggcgcctgctcagtcgtcgtcggcggcggacgggtgggtcatatcggccggcactacccacttgtcgaactcctcgggggtgaggaagccgagctcgagggccgaatcacgaaggccaatgcccttgtggtgggcgttcttggcgatcttcgaggccttgtcgtagccgatgtggcggttgagcgccgtcacctgcatcaggttgatgtcgaggttgtgcttgatcttctcgaggttgggctcaatgcccaccgcacagtggtcgttgaagctcacgcaggtgtcgcccagcagctggatggactccagcacgcaccaggccatgaccggcttgaagacgttcagctggaagttgccctggctgccggcgaagccgaccgtggcgtcgttgccgaacaccttggtggccaccatggtcatggcctcgcactgggtcgggttgaccttgccgggcatgatcgagctgccgggctcgttctcggggatcagcagctcgccgatgccattgcgggggccggaggcataccaacgcacgtcgttggcgatcttcatcagggcgtcgcccagcacgcgcagcgaaccggagacctgcaccagcgcgtcgtgggcgctcagtgcggcgaacaggttcggggcctgctcgaacttgaggccggtctcgtcgctgatcttctcggcggtgagcgggccgaacttcggatgcgcgttcaggccggtgccgacggcggtgccgccgatggcgagttcgcgtgcctgctcgtcggagaacttgatgcacttgagggcgaagtcgatctgggccacccagccgctgatcacctggccgaggcggatcggggtcgcgtcctgcaggtgggtgcgccccaccatcacgacatcgtcatattccttggccttggcgtccagggtgtcgcgcagcttcatcacgcgcgggtacatctcctgcagctcggtgaccacggcaatgtgcatcgccgtggggaaggtgtcgttgctggactggccacggttcacgtggtcattggggtgcaccggggtcttggtgcccatctcgccgccggcgatctcgatcgcgcggttggagatcacctcattggcgttcatgttcgactgcgtgcccgagccggtctggaagaccaccagggggaagtcgtcgtcgagcttgccggcgatcacgtcatcggcggccttgacgatgagctcggagatgtccttggggagctccccgagctctccattggcctgggcggcagccttcttcaggatgccgagggccttgatcatcgggcgtccccacacgaaggtcggacgaccgatgtcgaagttgtgcagactgcgctcggtctgcgccccccaatggtggtttgccggcacctcgacggtgcccatggagtcggattccgtgcgcgtcttcgcgctggtgttatcagccatggcctcagcctagcgatccggggcgttccccggcggtgagggggcatgccgcgacggacgcgatgggtggggcgccgatcggccgatcaggcgccccaccacggcacgacgcagggggtcctgcgtgacccatgtgcccgcgcgtccggcgtggggcagtgccctacaggcccggaaccggcgtcggtgcggcgcgtccggcgagcacctcgagggcgttcttcgcggcgagcgcggtcatcgccgtgcgcgtctcgatgttggccgagcccaggtgaggcagcagcgccacgttctccatggtcagcagctcgggctcgatggccggctcatgctcgtagacgtccaggccggcgccacccaggtgcccgctctgcagggcggccaccagtgccttctcgtcaacgcaggcgccacgtgccgtgttgatcagataggagccctgcttcatcgacgcgaggcgttcggcgttgatgatgtggtgggtctcgggggtcagcgggcaatggaggctgatcacatcgcagtgggccaccagctcatcgaccgacaggcccttggcgtccagctcgctgcgtgccggctcccgcatcggatgttcctgggcgtagaagacgtccatgccgaaggccttgcagcgctgggccattgcggtgccgatctggccggcaccgatcaggccgatcgacttcgtctcgatggagcgtccgagcatgaacgtggtgcggtaccgccacggcttgccggcgcggatcaaccgctcgccctcgcccatgcgtcgcgtcaccgacagcatcagtccgaacgccaggtcggccacggcgtcgaacagggtgcccggcgtcacggtcgccacgatgccgtgggcgcgacaggcgtcgaggtcgatgttgttgaagccggccgcgatgttcgccaccaccttgagctggggacccgcggccgcgatgaattcctcgtcgacgccgtcggacagcacggtcagcacggcgtcggcgcccttcacgtgcgccaggagctgttcgcgcgtgggtggttcctggccatcccacgtgatgacctcgttgccggcggtgcgcagggcctcgatgccctcggcaggtactccgtcggtgatgcagattctcgccatggttgatacccctttccttatgtaccggacgataccggcccggcaaggggtgcgtccggaacgccgccgctggcacggagaccgggagcagaaggcggcgggcgtgcacgatccggcttgaccgctgagacggcgtgcggccgcgggccttgtcggaccaatcggttgtagggtggccggagcgccggtttgagcgccggcggaacgatattgcctgacctttccaggagctctcatgacctacgtcatcgcgttgccttgtgtggacgtcaaggacaaagcctgcgtcgaggaatgtcccgtcgactgcatctacgagggtgagcgcaccctctacatccatccggaggaatgcgtcgactgcggtgcctgcgagcccgtgtgccccacggaggccatcttctacgaggacgacctgcccgacgagtacaaggagtggtacgacgtcaacgccaacttcttcagtgaactgggatcgcccggtggcgcggcgcgcctcggcccccagagctttgacgagccctcggtagccaagctgcccccgcaggcttcgtgaaactctcgcaatccctgcccgacttcccctgggactcgctggcgcgggcgaaagccaccgcgcaggcgcatcccgggggaatcgtcgatctgtcggtgggaacccccactgacccgacgcccgacctcgtgcgcgacgcgctcgcggcggcgtcgcaggcccccggctatcccgcagtctggggcagccctgagctgcgtgccgcgatcatgggctacctcacccgacgctggaacgcgacgggcctgcgcgatcgcaatgtgaccaccgcgatcggcaccaaggagatcgtcggctggctgcccaccctgctcggactggggcccgacgaccttgtggtgatccccgagaccgcctatcccacctatgaggtgggggcgctcatggccggggcacacatcgaacggtgcgacgatcccgaccgggtgcagggcgcaccgcgcctcatctggctcaacagcccgtcgaatcccagcggggcggttgcctccggggaactgctgcgacggtgggtggcgttcgcgcgcaagcaccacgccgtgattgcctccgacgagtgctacggggagttcgccttcgatgcaaaggcctacagcgtcatcgacccgatcatcaatgacggcgacatcaccggcctgctggtcgttgactcgttgtcgaaacggtcgaacatggccggctaccgggctggtttcgtggccggcgatgaggaactggtcaccgagctggtcgcgctgcgcaagcacctcggcatgatcgtgccgacgccggtgcaggcggccatggtggccgccctgggcgaccaggaacatgtggaacagcagcgcgcccggtacgcggcgcgccgcgccatcatgcgccgtgccctggaagcagcaggcttccgcatcgaccactcgcagggctcgctctacttgtgggccacccagggacgcgacgggcgcgccagcatcgactggcttgccgagcgcggcatcctggccgccccgggcgacttctacgggccgacctcccatgaccatgtgcggctgtcgatgaccgccaccgatgagcgcatcaacgcggcggccggacggctcacgagctgacaggccgcttggcgtgggtcgctggattcacgccgtgcgacaggtggcggtgaccaccgtgggatccaccgcgttctggcctgcccaggtggcgcgctggctggtgctgttggcccacgtcatgtcgcccacccggagtcccaccaggccggcctgcgagcccaggcacatgcacaacagggccaccgaccaggccgtggtcgccgaacccaccgtgaagctgagcccatcggggttgatggcgatcgggatcgccccgccccacacgcgcaccacgaattcacgcagcacctcggggttcccggtggcgttcttgttgtcgacgctggtgaccccggccgggtcgaaaccgcacagggcgctggcccagattcgtccgacgtcctcgtgctgggcataggcgtgcgggaagttcgaccgctgcaccttctgggcgacgtcattgatggtgtcggtctgccagccgtcgaccttgaccagcgcctcatagaacttgcccgctgaataccaggggttcatgatctggtcctcggtgccccaaccctggctggggcgttgctggaacagccccacggaatcggcgtcgccgtagtccaggttgtacaacttggactcctgcagtgccgtgacgatggcaatggtggctgcccggggaggcaggccgcgacgcagcgcctcgcccacgatgatggccacattgccggcctgctccaggtcgcgcaggtcgctggagccattgaccgtcgccgtgcatcccggtgagacgaagggagtggtcgcccccgcgcaggccgccagggcggtgagggagccgactgccccgatcgccaggagcgaccgacgggtcagccggcgtgccgtgcgctcagccatcgggcctcagttgtggtgcagcgcggcgttcagggtgatctgcttgcctctgcgtgccaacgccttcaccgccccactcaccgaatcgcggatgaacagcatgttgtggcccccggacagttcgcgggccttcaccaccgagccatcgggcatcgtcaccttggtgccggcggtcaggtacagcccggcctcgatgacgcagttgtcgcccagggcaatgccgcatcccgactcggcccccagcaggcagcccttgccgatgcggacgcgctccttgccgccgcccgacagggtgcccatcgtcgaggcaccgccaccgatgtcggagccgacgtcgacgatcacgccctggctgatgcggccctcgatcatcgaggcgcccagcgtgccggcgttgaagttgcagaagccctcatgcatcacggtggtgccctcggcgaggtgcgcacccaggcgcacccgatcggcgtcgccgatgcgtactccggacggcaccacgtaatcgaccatgcgcgggaacttgtcgatgctggtgacgatcagggtgccgtgggcggcgcgcaggccggcccgcagctcgttgaagtcgtcgggggaacagggcccggcgctggtccacaccacattgggcagcaccgcgaagatgtcgtcgaggttgatgctgttgggctggcacagtcggtggctgagcaggtgcaggcgcagataggcgtcgctggtgtcggccggcggctggtccaggtcgatctccaccagtcggggctgggtctcgacgtggcgcagctcgtccaccgcaaccccgctggtcacagcggagggagccggcgtgccgtcggattcccccagggccggactcgggaaccaggtgtcaagcacctgaccggacgaatggatggtggccaggccccagccccaggccctgcgcgatgcggcgttctgcgtcatgccagcgatcttaccgacgctgcggtgcgttcccgatgcgccggctgtgggccgtcgccacccgactggtcacgtcggcgggatcgctacgctgacgccatgacgctggataccagggacctgcaccgactgttcgcccagatcgtcgacatcgagtcggtcagccgcaatgaggaacgcctggccgacgccgtgcaggcggtgctcgagccgtgcggccacctcgaggtgacgcgccacggcaacagcgtggtggcgcgcacgcacctggggcgcgcgcaacgcatgatcatcgccggtcacctggacacggtgccggtggccgacaacctgcccagcaggctggagcaccgccccgacggtgactacctggtgggacgcggcaccgccgacatgaagggcgggatcgccgtcatggtgcagctggccacccaactggccgagcccgtccacgacgtcacctgggtgttctatgagtgcgaggagatcgaggccgccgccaacggcctgaccaagatcgccgcggcccagccacagtggttggccggtgacttcgcggtgttgatggagcccaccagcgcccgcatcgagggcggctgccagggcacgacgcgcttcctgctgaccacccatggcgtggcggcccattccgcgcgcagttggctgggccacaacgcgatccacgacctgacgccgttgctgcagcgcatccaggccttcccggtgcgccgcgtcatggtcgagggactggagtaccgcgagggcctcaacgccaccatcgtcagcgggggagtggccggcaatatgatccccgaccgtgcccagctgcaggtgaactaccgcttcgcgcccgacctggacgccgaccgggcactggcccggatgcgcgagctgttcgacctgcccgatgtcgacttcgaggtgctcgacctgtctccggcggcccgtcccggcctggaccgtcccgaggcacgcggcttcctgcaggcggtcggtggcacgcccggccccaaatacggctggacggatgtggcgcgtttcgggcagctgggcattccggcggtcaactatggacccgccgatgccggcaaggcccatgcggtggacgaatgctgccccctggccgacctcgacacatgcgccggcgcactgaccacgtggctgacgaaccgggcgcccgaccggtgagatctgaccagtgaaatcggcggacacgcgggggacggtttcagtattgggcggcaccggggcacgatggttaccggtagcggcgacactgcacggccatcagggtgcgccgagttggagacggtaatcattcgaaacgaaagaaagagacgtggatggcaatgaaagaagacgaggcccgcgagtccgatcccgcacgggtgcgaagcgcctcggaatgggccgaacaggcccccacggacaatgttccctcggcgcaggtcggcgaggtcttcgccggcccggtgatccgacgcggcgcggaggtggatggttccaccactgaccaacggttgctggagagccatcacgacggatcatggctgcacagcgatccctggcgggtgctgcgcatccaggccgagttcgtggagggcttcggagcccttgaggagctcggaccggccattgcgatcttcggttcggcccgtacctcgcgccaggcgaaggcctatcagcaggcccggcggatgggccacttgttggccgaggccggctatgcggtgatcagtgggggcggtcccggcaccatggaggcggtcaatcgcggtgcctccgaggcacacggacgttccgtgggcctgggcatcgaactgccctacgagtcttcgatgaacgagtacatcaacctgggcgtgcatttccgctatttcttcgcccgcaaggtgatgttcctcaagtacgcccaggggttcatcgtgatgcccggcgggttcggcaccttcgacgagttgttcgaggccctgaccctgttgcagaccggcaaggtgagccacttcccggtggtgctgttcgggtccgagtactggagtggactgctcgactggctcaggtcgcaggtgctgccctcggggaacatctcggcgcctgacctcgacctggtcagtgtcaccgatgacgtcgacgaggccgttcgcctggtcaccgaggcaccgcccttcgaaccccgcgaggactgagccgaggccctgaccgggtgggggaccaacgcgccaaccgcagactggtcccgactcacggcgtgcacccagccggcggcataatgacgccgtgtccgagcgcgcgcagggtcccagcgcgggcagcgccacaccacgacggaccacgctgggccgcctcagggcactggttgcccggttcacaccgtcgagccccaaggccttccgcgattcgatgtcgcgctggctgctgttcggggtggtgatcggcgtcgtctccggactcggcgcggtcggcttctactggtgcctgtcccacgccacccagtggttgctggtcgatctgggcggctacctgccgcccaccacccgcggcgagggcaccggcttcccgggcgccgatttcgcccgtccctgggcgatcccggccgtcaccggcggtgcagccctggtggccggcatcctggtggcatgcatcgcccccgaggccaggggccacggcaccgacgccgccatcgcggccgtgcaccacaaccccaccggcctgcggctgcgggccgcgctggtcaaggtggtcgcctcctcgctgatcatcggatcgggcgggtcaggggggcgcgaggggcccaccgcccagatcagcgccaccgtgatctcacgcctgtgtggtgccctgcgcatcccccgtcccgacgcccgcatcgccgtggcagccgccatggcctcaggtatcggcgcgatctttcgcgcacccttgggaggggccctgctcggagccgagctgctctaccgcgacgaccttgaggccgatgccatcatgccgggactcatctcgtcgatcgtggccttcgcggtgtacggatcggtgtacggcttccaaccgatcttcggcacgatgagcgggctcacgttcgtgcatccggccgagttgctgtggttcgcgctggtcggggttgccgcaggactgctcggccggtggtacgcccaggccttctatgcaggcggggcactgctgcagcgccttcccgtgcccagggcgatcctgccggcgatcgggggactgtgcgtgggcctgctgggactcgcggtgccggccgtcctgggcaccggctacgggtggacccaactacagatgaccagcggctggatgctgtcggccccactgtggttggtgctggtgatccccttcgccaagatcgtggccaccacgctgtcgatcggctcggggggctcgggcggcgtcttcgggcccggcatggtgatcggtggggccaccggggctgccctgtggcggatcatccacgacatgcccggcgtctcgtcgtcgccggcgccctatgtgatcatcggcatgatcgcctgcttcggcgcgatcgcgcatgccccgctcggcgtgatgctgatggtcgccgagatgaccgggaacctgtcgctgttggccccggccatgattgcggtggcgattgccacgatgatcgtcggcgacaattcgatcttccacagccagttgcgaaatcgcctcgaggcggcgcgcctgtatcgcgggaccccggcgccgtagggggagcggatagcattggtgcgtggtctgggctatcggaattctcatcatcgtggcaatcgcctgtggcgtgtttgccgcgcgggggaagctcggcgagctcgcgcctgcggtgcccgatcgtcccggccccgaccttcccgagtcgggcattcgcgccgatgacctgcacgacgtggtctttgccacggtcttgcgtggctacgaccccaagcaggtacgcgccgcgatggacgtgctcgcgggattgctctccgaaggggccaatcctccccaggaggccctcacccgggtgcttgccacccgcttcgatgtggtcacccggggttatgaaatggatcaggtggatgccgtgatcaaccgcgtggttgcgcagctctcggcaccccggcaggactccgatctgggcacctgacgcccagatgggagataatgaggtactagacgcgcaggacgacgagaaacgaggatccaatggcagcgatgaagccgcgcaccggtgacggccctatggaagttaccaaagagggccgtggaattgtgatgcgagtgccggtcgatggcggtgggcgcctcgtggtggagttgaacgccaccgaggcgagcgaactgctcgagtgcctcaagggtgtcgtcggctgatcaagacccaccagacaacccccccgggagcgcggccatgggctgcgcaccacccggacacgaagatgcccagcacgcaatgtgctgggcatcttcgtcgtgctgggcctcttgtcgtcggggcaggaccctcgtccgcgaaggccctgccccgaacgtccgccttctgctggcggctcagtgggttccgctggccagctggcggccgtgggccgcgtagtactcgatggcgtggttgtacacatccaccgtctgctgggcgatcttggcccagctgaagtggtcgatgcagcgctggcgaccggccttgccgaaggcctcggccctcgccgggttgcgggtgagctcattgacctgctcggcgaagcggtgctcgaagtcggcgatatagctcgcgtcattctcctggtctgggtcataggccacgagcgaacccgtgacaccgtcgtcgaccacctcgggaatgccgcccacggcggaggcgaccacggacgcctcgcaggccatcgcctcgaggttcacgatgcccagtggctcgtagatcgacgggcaggcgaacacggtggcgtgggagtacacctgccgcaccgcggcgcgcggcgccatctcctccacccagatgaggtcgtcgcccatgatggcacgcaattcctcgatggcggtggagaactgttgggcgatctcgggggtgtccggggaacttgccagcagcaccagctgggtgcccttgtcgaactcgcgggcggcgcgcaccaggtgcaccaggcccttctggcgggtgatgcgtcccacgaacgccaccgtcgggcggtcgaggtccatgccgatcttgtcgcagtagtcgtgcgcggcgtcggggtagaactcctcgacgtcgatgccgttgcgcaccacatgcaccttgtcggggtcgagctcgggataccagtgcaggatgtcggcagccatcgccgaactcaccccgatcaccgccgaggcgccctggaaggccgtgcgctcggcccaactcgacagctcatagcccccacccagctggtccttcttccagggacgcagcggctccagggaatgggccgtcaccacatgggggatcgaggcgaacagccccgagaggtgaccacccaggttggcgtaccaggtgtgtgagtgcaccaggttggtgtcggcctccaacgaggccaccatcgccaggtcggcaccgaagacccgcaacgcggcattggcgttgggcgggtagtcctccttgtgcgccaccgcactggggcgcggctcgcccatgcactgcacgtcgacgtcgacgagcttgcgcaactgcggcaccaactgcgccacatggacgcctgcgccgccatagatggtcggaggatattcacgggtgaggatcgagacgtgcatgccccgatggtgtcatattgcgggcccgtggaggccgttggtgagcgatttgtcatgacagcctcccaaggcccatcgcgggcgctaaattatggccatggcaaccccaagtgtcttgtccatcgtgcttgctggaggcgaggggaagaggctgatgcccctcactgccgatcgggccaaaccggccgtcccgttcggtggcacctaccggctgatcgacttcgtgctgtccaacctggcgaactccaatctgttgcggaccgccgtgctcacgcagtacaagtcgcactcccttgaccgtcacatctcgatgaagtggcgcatgtcggccatgctgggcaactatgtgacgcccgtacccgcccagcagcgtcgcgggccgcactggtaccagggcagtgccgatgcgatctaccagtcgatgaacctcatcaaggacacccgccccgactacatcgtggtcttcggggccgacaacatctaccggatggatgtcatgcagatgctcgacgcccacatcgacgccggcgtcagcgccaccgtcgcgggcatccgggtgccgcgctcccaggcgtccgacttcggcatcatcgacgcccacagcgaccaccggatccgcagcttcctcgagaagccggacgatccccccggcctgcccggttcccccgaggagtccatggcgtcgatgggaaattacatcttcaccggtcgggccctggtggacatgttggaggccgacgcgcgcgacgaggactcaaagcacgacatgggtggcaatatcgtgccggccttggtggacgcgggcgacgcgatcgtctacgacttcaaggacaatgtggtgcccggcgccaccgagcatgacaaggactactggcgcgatgtgggcacggtggacgccttccactccgcccacatggacctggtcagcgtcgtgcccgagttcaacctctacaacgaggaatggcccatctgggccgactcggtgcaggcccccggagcgaagttcaccctgcacggcaacgcggagagctcgctggtcgcgcccggttgcgtgatctccggcggcgacgtggaccattcagtgctcagcccgaaggtgcgcgtggagaagggggcctcgatcgaccgctgcgtgctcatggaggaggcgcaggtgggggaggactgcatcctgcgcaatgccatcctcgacaagggcgtcgtgatcaccccgggcaccaatgtcggcattgatcccgaggacgacgaacgccgcggactcaccgtcagccccggcggtgtcaccgtcgtgccgaaggacttcgtggtgaccaaggacggatccgagcagggcaacccgctctagcgggcgcccggacgccggctgatggccccggtcggcgaccagcgcaacaccagcgtgcacacctggctgtggccccggcagctgccggggccacagccacgttcgtgtggtgtgctcgttcgtggaacgtgcggtgctcagccgctcacggccaccagcaggccatcgccgaccggtagcagggccgtggtgaggttctcggtgtcggtgaccgactgcagcgcctcgcggatgatcaccgtctcatcgtcctcattggagggatcggcgatcttgttgtgccacagggcgtcgttgatcacgatcaggccgccgggacgcagcagccgctgggcctgcgcgaagtactcgacgtattcgagcttgtcaccgttgatgaacaccaggtcgtaggccgagtcgcgcaggttgttcagcacgtccagcggcaggcccgggatgaggcggaaccggcgggtcgggatgttctgcgacaggaatgcgttgcgggcctcgagctgccactgcgactgggggtcgatcgacgtcagcacgccggagtcgcccatgccggcgaagaaggccagcccggaggccccggtcgccgaacccacctcgacgatcgcctgggcaccgatggcccgggtgagcatcgtcagggtgctgcacgacccattgctgagctggggtgcacccatcaacacggcctggtcacgggcctcacggatggcctcggacatgggcacgaagtcatcggcgaagaccagggaactcgcgtccaggtcgacggaaggcgaattcttatggttatgcggcgctgtcacgcgcccagcctagcgggcaatgtctctaccatgtataagtgcgtgcagatggccggacccttgattcgggcccggagcaggcacgcggaacactagaaggtggggcacaagcgggtgtgccacaggtacggaaggcaaacacgatgactgaaccgatctttggccgaatgttgaccgcaatggtcacccccttcaacgccgacgggtccctcaacctgcccggcgccaagcgcctggccgcccacctcgtcgacgacctgaccaatgacgggctggtcatctcgggcaccacgggggaatcgcccaccacgaccgatcgggagaaggccgagctcctcgcggcggtgaaggccgaggtcggcgaccgggcgaacctcatcgccggtgtgggcaccaatgacaccgcgcacagcatcgagctggccaagcaggccgagcaggccggggccgacgcgctgctggtggtgacgccgtactattcgctacccccgcagtcgtccatcatcgaccacttcgtggccatcgccgactccaccagccttccggtggtgctctacgacatcccgcaccgcagcggccgggccatcgaaaccgattcgctgctgcagctggcgcgtcatccccgcatcgtggccgtcaaggatgccaagaaggacctggacgcctccggcatcgtcatgtcgcagaccgacctggcctactacgccggcgacgacgcgatcaccctgccgctcatgtccctgggtggcgtgggcctggtcggcacctccacccacttcaccggacgcatcgcccaccagatgatcgacgccttcgtcgcgcaggacctgaccgaggcgttgcgcctgcaccggctgctgctgccggtgttcaccggcgtcttcgccacccagggctgtctcatggtgaaggccggcctggcgcaccagggcatgccggtgggccattgccgggccccgctcggcgaggcccccgccgaattggcgcaggccttcggcaagatcctggacgccgccgagctgtagccgcccccgccgtggcggacgggaggcccggcgcgtcccgaggggcggtggccgcttcgtctgccggcggtgcggcgactagccttgtggcgtggttcctctggccatctttggcatcaacgggagcgagttcgtcatcctcgcggtgctcgccgtcatcttcttcgggcccgagcgcatccccgagttcagccgcaaggcggctcgcgtggtgttctatgtgcgaaatatcgccaatgacgccacctcccagctgaaggaggagctcgggcccgagtacaaggacctcacggtggaggacctcaacccgaagaccttcgtgaagaagcacctgctcgacgacatccaggaccagatcagcgaggtcaaggatgacctcaacgtggtgaagaccgaactcaacatggccggcgaggacgtggccgccgcgtcggccggcgtcggtgcggcgatccacgcagacagccctgcgccggttgacccggatgtcgcctcgatgagggcccgctatgggctgtgcttcgatcttgaggccacctgaggcatcccgggggcttcctcgcagggcgtgacgatcttgaactggtcgtcaggccggtgggcgtgaacccggtgatcatgaacacggtgatcatgaacacagtggaggggccggcgtcatgacgccggcccctccactgtgttgctgtgttggtgtcgttgctgtgttggtgttgcggaagttacttcacggccatcttgagcggcttgccggccagccccttgggcttggacgcaagcatcgccgccagggtggtgatcgccttcgcgctcgggttctccggggcggccagcaccaccggatcaccgctctcgccgccggagctgatcaccggatcgatcgggatctggccgagcaggggcaccgaatggccgacacgctcggtcagtgccgcagccgtctgggcgccgccgccggcaccgaacagctcgatgtggtcgtggttgccgcacttggggcaggtgtaatcgaggtagctcatgttctccaccacgccgatcacctgctggtgcatcatgttggccatcgtgccggcgcgctcggacacctcggccacattggcctgcggggtggtgacgacgatcacgtcggagccgggcagcttctggccgatcgacatggcgacatcaccagtgccggggggcaggtcgatgaggaaccagtcgaggtcgccccagtagacgtccgccagcagctgggtcagggcccggtccaggatcggcccgcgccaggcgatcacctgatcgcgggattccttgagcatgcccatgctgatcgagctgatgcccagggcgggtaccggcatgatcatgtcgtcgacgaccgtgggatgcgcatcggggatgcccagcatgtcgggcaccgagtgtccgtagatgtcggcgtccagcaggccgaccttcagcccgcgctgcgccagcgccagcgccaggttgacggtgacggagctcttgcccacgccacccttgccggacgcaacggccagcacgcgggtcaggttgcccggctgggcgaaggtgatctcgtgctcgggctcgccgccacgcagcgtattgcgcatggcctcgcgttgctgggcgttcatggtgcccaactcgatgttcacgtccttgacgccctcaaccttgtcgagggcgttctgcacatcgccgcggatggtggtctgcaggggacagccggccacggtcagcaggatcttgacgtccacattgccctgatcgtcgacgctgaccccatcgaccatgcccaggtcagtgatcggccggcggatctcaggatcctggactgttgtgagtgcctcgttgatctggggcaacagggggttttcagcatcgctcatagagtcgtgtctacgtcaccggatgcatggatttcaaatctccgggcgactatcctgcgcgcgcaggcgtgcgatgcacgttcgccgagcccccgggcagatcccacgaccttggttccgggcccgccgaggggtccggacgctcaggaaccgtcgggggaggcgtcggtgtgggagctctcctgggaggccgcatcgtcggcctcgtcatcggaatcctccagctcggcgatcagctcacggatctggtcgcgcagctcggagcgcacgaaatcacgcgtggccatctcgccgacgctggcgcgcagcgaggcgatctcgcgggccaggaagtccatgtcggcgcgcgactgggcggcgacccggcgatcgtcctccaggctcaacttgtcacgtgcctcctgacggttctgcgccagcaggatcaggggggccgagtaggaggcctgggtggagaaggccaggttgagcaggatgaatggataggcgtcccagtggtgccagctgcccagcacattcaacgagatccagctgatcacgaagatggtcatccacagcaggaacgcggggctgcccatgaagcgggcgatccattcggcgaactgtccgaagctgtcgccggtgaaggggttcttcaggtgacgcttgaatcgcgtgcggtcgcccggcgtgttgagtcggtcatctgcccagctgttgtcgctcattcgtccgcctcccggctctggtcatcggggtggatgccgtccatctgaacgccgcgccagtcgtcgggcagcatgtggtccagcacatcgtccacggtcacggcgccgacgagctggccgcgtgcgttgaccaccggtgcgatgacgaggttgtaggtggcgaagtagcggctcacctggtagaggcccgcgtcgggggccagtggctgcaggtcggcatcgatcaccgaagcggtcatcaccgaaggcggttcgcgcagcagtcgctggctgtgcaccgcgccgatatagcgcccggagggcgtgtcggtgggtgggcgggtgatgaacaccatggaggccgtcgccggggtcacgtcctcgcggctcacggcggccagggcgtcggcgatggtggcgtcgggggcgagcaccaccggttcgggggtcatcatgccgccggcggtgaggtcctcgtactgcatcagattgcgcacgtcggcagcgtccttgggctccatgcgctccagcaggtcctcggcgaagtcggtgggcaggtcattgatcaggtcggccgcgtcgtcggggtccatctcctcgagcacgtcggcggcgcgctccacctccaggcggctcagcagggacacctgctccgactcggggagctcctggaaggcgtcggcaagctgttcgtcatcgagtgcctcggccacctcgacgcgccgcccgggatccatgtcatgcagctcacgggccacgtcagcagggggcatgtccgacagctgcgccaccttctggtcggtggcctggtcggcgcgtgccacggtgctggcgatatcggtccacggcgcggtgaacacgctgcccttgcggctcgcgaagctgaagggacgcttggggagccgctcgcgcagggccacctccacgagttcccactgccgggtgcgcacctggcgcatggccacatcgaagatggtcgccgacttgccctcggtggtgatcaccgaccgatcgaacaggtcgtcgaacaccagggtctcgttgtcacgctgcacgaaacggcgcgcatcgatcacgccggccagcgcaatctggttggcgtccaccgaatggaccctctccatcggaacgtagatgcgccgggccgccagcaggtcgacgaccatgcccttgacccggggtaatcggcccggcgatcggaactggcagacgaagtcgcgcaccttgcccacctggtcgcccgatgcgtccagcacgggcagaccctggagccttgagaggaagatcgatgtcatttgagggctcacgcacaaaggctacctgtcaggggcgcgcgcgaggacacgcgtcgtgtcacggatggacacgcggcgtggccggttccgggggatgcccctcgcgtccgcggcgccggcggcggacacacacctcggggcacaggtgacgcgcgggcgcgggggcattagcgtgagggcatgacctttcgtccgcgtcgttccgtgctgtacatgccggcatccaatcagcgagccctcgagaaggccaggaccatcgactgtgatgccatcatcttcgacctcgaggacgccgtggcccccgatgccaagccccaggcccgccaggccgcctgcgacgccgtcgccagtggcgactacggctaccgcgagctcgtggtgcgcgtcaacggcgtgggcaccgcctggcatgacgacgacctggccgccgtgtgtgcggcccggccggcagccatcgccgtgcccaaggtgagttcgcccgagcaggtgcgccagctggtggacaccttcgagcggctgggtgccgacccgcagatgaacctgtgggcgatgatcgagacgccccgcgcgatcgtggacgccgatgccatctgtgcggcctccgagcgactcaatgtggtggtgctcggcaccaatgacctgctcaacgagctgcgcgcccagtcggtgcccagtcgccggccgctgcaatatgccctgtcagccgcgatctgcgccgcacgcgccaacgacaaggtcgtgctcgatggggtgttcaacgatgtgcgcgatatcggcggcttcgagcaggagtgcgtcgatggacgcgtcctgggcttcgatggcaagacgctcatccaccccggtcaggtcggcatcgcgaatcgcgtgtgggcacccagtgccgacgacgtggcacgggcccgcgagttgatcgacaccttcgaccaggcgttggccgagggccggggagtggtgacattccacgggaagatgatcgagaacctgcatgtcgagacggcacgacgcgtgctggcgatgcatgaggcgatccgcgcgcgctgaacgcccgggcgtgctcagggagcacagagcagacgcacagaaagttcattcccgctccatagcgggacctgtggaatcgggaaatccggtggctaggctggagtgagttccgccgaggtgcggcgggcccgcaaggagcaaccaatgtctttcctcagccctcagggcgcagcggcacagggcggcccggccggtcggttcaccctgcagcgtcccgtgtccatcgccatctacaactcctaccaggacgcccagcacgcggtcgactacctcgccgatcagcgattccccgtgcagaacctctcgatcgtcggcaccgacctgaagagtttcgagcggatcaccggaggactcacctggggcaaggtgctgacgtcctcggcgatgaccggcgtggtgtggggcatcatggcctcgctgttcctgtggctgttcatccccaacgtcaaccccttcctgatgctcgtcagctcgctggtcatcttcgtggcggccaatatgatcacctcggccatcggctaccggatgactggcggacgccgcgatttcacctcgaccacgcagatcattgccacgcactatgaggtgctgggcgaggccgaggtggccggtcaggcacgcgccatgctgtccggtggccagaaccgcggagcatcgggtggccagcactacggcgtcgcggggcagcagccctatggggcaagccagcaggccgggcagccgggttccgccggctcccagcaggcacccgccaccaccgggtccgggttgttcccgccgccggcatggcccgcgcccaacagtcagtcgggcaccacgtccacccagtccggcacgtcgcagggctatccctcgcagcagccgcccgcagcggccggccagtcgccggcacgcggtgtcgtcgagcagccgaccaacggtggctccaccccgggagaggggaccccgggagcgcagggctcggatcaaccgcccgcctccagcgcgggcacctttgacccgaccggtggtcgtgactgaccactgacgccgtgccgtggtgctgccgcagcacttgctttccgcctcatctgtgagattgcccggacccccgcgggggtccgggcaatctcacgttcatggtcggcagggcgggtccgcgcgcccctacttgcggacgaccgaggccatccagtcctccacggcccggctctcgcggggcaggtgcgacgacaggatgtcgcagccgttcggggtgatgacgatgtcgtcctcgatgcgcacgccgatgccgcgcaactccgggggcaccttcaggtcggtcgacttgaagtagatgccgggctccacggtgatcaccatgccggcccgcaatgtgcccttgcggtagttctccactcgtgcctgggcacagtcgtgcacatccaggcccaggtggtggctggtgccatgcaccatccagcgacgccactggccacccgcgggtgacagcgcctcgtcggggctcaccggcaggatgccccagtctgtaaaggtctgcgccagcacgcgcacggccgcattgtgcacgtcggcgaacttggcgccggcccgggcagcgtccatgccggcctgctgcgacgcccgcaccgcgtcatagacctgacgctgcggggtggtgaaggtgccgcccaccggcatggtgcgggtgatgtcggcggtgtagagcgagtcgatctcgatgccggcgtccatcagcacgaggtcgccctcgcgcagtgggccgtcgttcttgatccagtgcagcgtgttggcgtggtcgccggccgccgcgatcgtgtcatagcccacggcattgccctcgtggcgggcgtgcaggccgaagatcccctcgatccaccgctcgccgtgcccgtattcgacggccttgttgaagttcgccaccacgtcctcgaacgccagggcgctcacccggcaggcctcgcgcagctggtcgagctcccaatcgtccttgaccaggcgcagttcgctcagtgcggtggccagctcggcatcgcggtcgagctggatcgcgccacgggtgtcgtccaccgtctcggtgacggcggggtcggcctcacgcaccacccgcagcggcgcctgcccggcggacagggcgtcgccgaggccgcggatgtccaccgtcgggatcccacaccgtgcggacatctccgccagggaatcgcgctggcccacccacatctcgccatagcgtgccgaggcatagaactcgggatcggtgcgcggggcgcggggatggaagtacagcctcgcctcgccgtcgggctcgatcaacagcaccgcgtccggctcgcggtcggtgcccaggccggtgaggtgggtgaatgccgaatggggacggaaggggtagtcgcagtcgttgttgcgctgcttgtagctgccggccggcactaccaggcgctcgccggggaactgctgggcaatgtcggcacggtgcctgctggagctcgccaccgagtccagtggcagcggaagctggtcgctgtagggcgcccagtcctcgcagatgaattgcttgaacgcactcgagaagggcgtgcgtccctcggggatcttcggttgcttgtcgctcatcatcaccatcgctgttgccgttgcctgccggccgcgcgccatccgcgcaccggtcaggaggacgtacctgcgtcggggccggacccgtccacctgcaccgatcctatggcgtggctggttgtgcgtgccgggccgtgcatggtctcccggctagggtggatgaatcagaaaggattcacctatgcgagctgacccttccgcccagcgccgactgcttgatctggcacatatcgataccgaattggtgcagctgcgtcatgccggtgagcacctgcccgagaaccagcagctgtcggccctgcagaccaagaggctggccctctcggaacgcatcaccgaggcggagacacgtcgtggcgacgcccaggccgaggtggaccgggtggagaaggacctgaatcctgccaaggaacgcctcgcccgcaatgagaagcgcgtgcattccggtgagatcaacagcgagcgcgcgctgaagggcatcaccgacgagatcgaacacctcaagggacgcgtctccgacctcgaggacatcgagctcgaggcgatggaccgggtggacgccgccgcccgcgagcatggcgagttcaccgcccagcgcaccgagatcgagaaccagatgcgcgccctgctcacccagcgggacgacgcgaaggccggcctgcagaccaagcgcgaccagctgcagcgcgaacgtggtgagatcaccgatgtgctgcccgaagacctggtgaagctctacgaccacgtggccgagcacaccggcaacaccggtgccgccgagctgcgcgccaagcgctgtggtggctgcggcctggagatcgattcggccgagctgcaccgcatcgccgccgagggggccgacgtggtgctgcgctgcgatgagtgcggacgcatcctggtccgtacctcccagtcgggggtctgagccccgccggggcgggcagggccgtctgccggtatgtccgtgagctgacacgtcgaatggcacgtgagctggtaggtgggggccaccggcgacggtagagtggtcggctggacgagccggccagatgatcgcggcgcttcggcgtcgaggaaagtccggactccacagggcagggtggtggacaacatccacccggggtgacccgcgggacagtgccacagaaaacaaaccgcccgagcaatcgggtaagggtgaaacggcggtgtaagagaccaccgcgacgcaggtgactgcgtcggcagggcaaaccccacccggagcaagaccaagaaggacgaggattcctcgcccgcgcaggcgtttgagggcggcccgcccgatgcctgcgggtaggttgcacgcccggcgtggaagcgccgggggaaggccgttggcaacagcggtcgcagatggatgatcatcggctcctggagccacagaatccggcttaccggccggctcgttccctccccgcccagcatgctgcactgcgtgcattttcgctggcggggaaactgtgcgtcccctatggttcacccatgcgtcgattcttcagcgctgccatcgcaatcctgctggcagccaccctcacaccagccctcaacgcgcccatggcgagtgctgcggaccaggcgtccgcgacctcctttgtcgacgtgcccgccaccaaccagttcttcaccgagatcacctggttggccgaccgcggggtgaccaccggttacccggacggcagcttccgtcccctgcagccggtgaagcgcgacgccatggccgccttcctctaccgctatgcgggaagccccgaggtcgccgaccaggccgcctcgccgttcgtcgacatctcgtcgtccacccagttctacaaggagatgtcctggctggcccagaaggggatctccaccggctgggagaccggcaacggctgccgcgtcttcaagcccatggagcccgtaaagcgtgacgcgatggacgcgttcatgtatcgcctcaccgagggtggcggcacgccgatcaccggcggcggttgcaatgccaacccgaacccgaatcccaaccccggtgaggggaccgtgcagaccggagtccacttcggctcgttctgcgcacccgagggggcgaccggcaccaccgtgcagggcatcaccgcgacctgcaagaagtaccccggcgagccccgcgctcgctggcgtcgctgatccggtcactgactgaccgggccccgggtcactccgggagagtgcccaccgacaacgacaaggcggctggtccacgatcgtggaccagccgccttgtgcgttccggaaccggtctcccggaccggggtcaggctcggctcagtggatgtccgacaggtcgatcagggtggggtccccgcccaggatcggctggccgctgctcggcagggtcaggatctcggtgccgtcgttggtgaccaccagggtctgttcgaactgggcgctgcgcgatccgtcacgggtgacgacggtccagccgtcgtcccactgctcggtctcggggctgcccaccgtgagcatcggctcgatggtgaaggtcatgcccggctgcatcggggtgttcaggcgcggctcgtcgtagtgcaggatgatcaggcccgagtggaatgcggtgtgtacgccgtggccggtgtactcgcgcaccaccccgaagtcgaagcgcttggcgtaggactcgatgacgcgtccgatcaccgagatcggccggcccggcttgcaggccttgatgccgcggtacatcgactcgcgcgtcacctcggtgagcttcttcgactcctcgtcgacctcgcccacgtagtaggtggcgcaattgtcgccatgcacgccgtcgatgtagctggtgacgtcgagcttgacgatgtcgccctcctcgagggggcgcaggtcggggatgccgtggcagatcacctcgttgaccgaggtgcacaggctcttggggaaaccacggtagtccagggttgccggccaggcatggtggtcgagcatgaactcgtgggccaccttgtcgaggtggtcggtggtgacgcccggcgcgatctccttggcggtcaccaggatggcgtcagcggcgatgcgtccggcaatccgcatcttctcgacgatctcggagctctggacgtctgacccggtgtacgtctcgggacccatgacccccacatagggagggcgctcgatatcggcggggacggtcaattcttcagtctgtggatacggcttgattgcggtcacattcccattctacgagcgtcacaccagaggccccagcgcggcggcgacagcatggctgacgtcgcgatcagcgccgtggtcagccggtcacccgcagggtcttcatggcggcgtcgaccttgccgttgcgccccgcgtcgccgaggttcgagctgccgaggaacaggccgaggtggtcccggttgcccacatccaccacgacgatgtccacccggtcgccacgcacctgggggatatcgcgcatggtcacatagacctcggtctggatgtgccaggcggggtgcccgtccaccgtggtctgttcgtccaccaggtccttgcgcccggtgaacccgtcgtagtagtcggtgctggcatagcactcgagggtcgaatgggccgaggcccgcacgtcggtgaatccgtcctgcgcgttgagcgcgcccaccccgatattggagaaccaggtgtgggtgacgccgaagccatggctggtgtacaccgtgtcggccacggtgtgcaggtcgctgacccagcgcagtgacatggtggccggctgccaaccactgatggcgtccacctggatcccgccgccgctcagcaccttgttgctggcctgacgcgtgacgccggtcgccgaggtcgtggggcagggggcgtgcgaggcgttgtccgaggggctgggtgtgggggtggaggtctcgtcccactgggacccggtgggcgaggcactgttggggtcctccctggcgtttccaccgctccacggggccgtgccgccgcgggtgagcaccacggcgatgatcacgccgagcgccacgagcacggcgaccagcgcgatcagccagccgcgacgccgtcggggggtcggggcggggccctggggtccgggagcgggtgtggcggcggggtcgttggtggtggccccggtccaggcctgaccgtcccaatagcggtacaggccgggggtgccggccggatcgggataccaaccgggcgtggggcctgacgtggacccgccaccgggccacgatccggaactcgacatgtgtgactcctcaggacgccatcggcaaacgtcggcggcagcctatcgtccgccccatgggcggggccggcgtcgccaccggcctcagccggtcaccttcagcgtccggatggcctcgtcgaccttgccgttgcgggtggcgtcgcccaggttcgaactgccgatgaacagtccgagctggtcctggcggcccaggtcgaccacatagatgtccacccggtcaccgcgcgcctggggcacattcggattggtcacatagacctcggactggatgcgccacgccgggtggccgtccaccgtggtctgctggtcgaccaggtccttgcgcccgctgaagccctcgtaatatcccgagctcgcatagcattccagcgtcgcgtgggccgaggccctcacctcggtgaagccgtccttcgcgttgagcgtgcccaccgcgatgtccgacatccagcccgggtacaccgtgtcggcgaccgagtggatgtcggagacccagtcgaggtagaaggtggagtcatatccccaccccgagatgcggtccacctggaggttgccgctcctcagcgtgctgttgctctgggcggtgttcgtgcgcaccgtcgtccgcgggcactggacgctcgaggcgttgtccgaggggctgggcgtgggggttgaggtctcgtcccactgggacccggtgggcgaggcactgttggggtcctccctggcgtttccaccgctccacggggccgtgccgccgcgggtgagcaccacggcgatgatcacgccgagcgccacgagcacggcgaccagcgcgatcagccagccgcgacgccgtcggggggtcggggcggggccctggggtccgggagcgggtgtggcggcggggtcgttggtggtggccccggtccaggcctgaccgtcccaatagcggtacaggccgggggtacctgccggatcgggataccaaccgggcgtgggcatcggtgtcacctcacatccagtccgcgcagcgtcatcgcgcggatccgggtggcggggccgtgcgatctcggcggcagcctatcgtccgaccatgtgtcgagtgcccagcacattcacaggcggccaccccacaggggtgacggtgccgatcacctcagccggtggtccgcgccccccgtcgccacgggcactggcacactggacgcatggatcgtcaaaccgagttcgtattgcgggccgtcgaagagcgcaatgtgaagttcatccgcctgtggttcaccgatgtgcagggattcctgaagtccgtggcgatggcgccggccgagctcgagggggccttcgccgagggcaccgggttcgacggttcggcgatcgagggctatgcgcgggtgttcgagtcggacatgatcgcccgtcccgatcccaccaccttccaactgctgccgtggcgcaccgaggcgagcacggcccgcatgttctgcgacatcgccctgcccgatggctcgccggcgatggccgatccgcgccatgtgctcaagagcgccctcaataaggccgccgacatggggttcaccttctactgtcaccccgagatcgagttcttcctgttcaagaagccgatcattcccggccagatgcccgagccgctcgacatggccggctacttcgaccacaccaccatggacgacggcaccgacttccgccgtgacacggtgatgatgctggagcagatgggcatctcggtggagttcagccaccacgagacggcacacggccagcatgagatcgacctgcgctatgccgacgccctgtcgatggccgacaacatcatgaccttccgcgtggtggtccgtgagatcgccgcccagcagaacatcctcgcgtcgttcatgcccaagccgttcaccgacatggccggatcgggcatgcacacgcacatgagcctgttcgagggcgaccgcaatgccttctatgacgccaccgacgaggtgcgactgtcgaagatcggtcgtcaattcgtggccggcctcctggcgcactccgccgagatcaccgcggtgaccaaccagtgggtgaactcctacaaacggctggtgggcggcggcgaggcccccgcctacgtctgctggggccgcaacaaccgctcggcgctcatccgggtgccgctgttcaagcccaacaagccgtcggcggcacgcatcgaataccgcgccatcgactcggcgtgcaatccctatctggcctacgccctcatgctcaacgccggcctggacggcatcacccgcgaactgcccctgcccgacgaggccgaggacgacgtgtgggcgctgtcggagcgggaacgccgggcactgggcatcacagccctgccgcgctcactcgatgaggcgatcgacgcgatggaatcctccgaactggtggccgagacgctgggagagcacgtcttcgactacttcctgcgcaacaagcgggccgagttcgaggaatatcgcgcccaggtgacgcccttcgagctgcgcacgcacctgccccacatgtaggaccccgtcgccgggcgtgcaaccgtggtcgtgcgcccggacggaccggccggggtcagtgcttgatcaccggaagcatccgggaaacctggtcggcatgcactcccgagacgcgcagccggtgctcgtcgcgggcctgctgccagctcagtgagccggtgcacagggcccagaaggtgtccggatcggtttccaccacgttggggggcgtcccgcgatgatgcgtcggcccctcgccgaaggcccccagctgtaccgccgtgaccggcggcacccgcagttcaatggtgtggcccggatagcgctcctcgagcgtcaccgccagcgcccgcaacgcctgctgcgtgcttgccggatcgagccgcgcgccgaaatgctgggcgagcttgcccaacgagacggtcagccccgcgatcaggtcggacaggcgcaccggccccacgaagctggtcaccgccggcggcagcggatcggtggtgagtgcctgctgggccgccgcgatggccgaggcggcgcgttccctgagctggcgctcattgcaaccatgggccacctgacagatggtggcactgtgctgggacttgcactcgccccaggcgagcagcaactgcgagatcgattgcggggcggtcctggtgggcaccgccagcgccgaggtgatggcctcggcgatcgcgatgaggtgggccagtgactggcgtcccgcggtggccgccggctccagaagtgtcggcaattgcgccgccagtactgcggcggcacgcttggtttggcgaagctggcgatcagccatgtgttgctcctggcagtgaagtattcaaggggcccgacgcgacgatggcccttgcgaccaccccgtcttgtgcgggtcttcagcgattgacctcatggcgcactttggcgtcaatgtgtccgcgaattgcacgccttcgtggcgggtgtgcaacggcatggcacaacattccacgatactccgcagcaggaaacttcggcttggctagtctcactcaggacgacactgatcaggtggggacatgaacggacgcacgaggacgccggccggcgagctggcccgcaagggattcatcgacgccagccgcgccgccgagctgttcaatggactgcccgaatgcaccgatgaactggtggatgcgctggccgcagccgccgaccccgatcaggccctggccggcctggtcgacctgcaggcagccgacctggtgggcaccctgcaggccctcgccgaggaaccctggcgccgtcggctgatcgccgtgctgggtgggagccaggccctgggccagcacctcatcgcccaccccggagacctgacggccctgcaaccggagcccgcacggtggagcgccgaacagatccgagccgacctgctggccgaggtcggactggccgagcgggcagatgacggcctcgctgagctcgccatggcggtggccgatgatccgggtgccgccgatcggctgcgcctggccaacaagcggcacctgctgcgcatcgccggacgcgacctgtcctccacccagcccaccgcgatcgtcgaccagatcgccgccgagctggcggaccttgccgacgccatcatggtctgtgccctggccatcgcccgcgcacagaccccgcacgccgaacgggccaggctcgggatcgtcgccctgggcaagtgcggcgcccaggagctgaactacctgtccgacatcgacgtgttgttcgtcggggaaccggcaaccgacgaggtgggccagaccgaggccatctcgatcgcgaaccggatcgccggggccacggcgcggatctgctcggcacattctgccgccggcaccatctggcaggtcgatgccgcgctgcgtccggagggcaacgccgggccgctggtgcgcagcctggagggccaccgggcctattaccagcgctgggcgaagaactgggagttccaggccatgctgaaggcgcgtccgatggccggcgaccccgagctcacccggggcttcctggacatcaccacgccgctggtgtggcaggtcggtggacgggagaacttcatgagcgatgtgcaggccatgcgccgccgcgtggtgagcctcatccccgccaaggacgcccagagcgagatcaagctgggcgccggcgggctgcgtgacgtggaattcagcgtgcaggccctgcagctcgtgcacggacgcgtcgacgagcgcctgcgccaccgcggcaccctcgtgtcattgcaggccctcgccgagcacggctacgtcggacgggacgactccgccgccctggacgcctcctaccgtttcgagcgctgcatcgagcaccgcatccaggtggccaagctgcgtcgaagccacctcatgccgcccgacgaggccgaccggcgccgcatcgcgcgcagcatggggatgtcggaggccgcggacctgtggacgagctggcggcgcaccgcccgcgacgtcgagagccggcagaacaagatcttctactcgcccctactgctcaccgtcagcaagctgtcggacgaccagatccggctgtcgcccgacgcggcgaaggaccgcctcaaggcgctgggtttctctgatccgggctcggccttgcgccacatcgaggcgctcaccaccggttccagccgggcggtggagatccgtcgccagctgatgccggccatgatcggctggctggccaccggcccgaatccggacctcggcctgatcagcttccgtcggctgtccgagacgatgggcaccaccccctggtacctcagggcgctgcgcgatgggggacagatggccgagctgctggccacgatcctgtcgtccagccgctacgacatcgcgatgatcgaacgtgacccggccgccgtccagctgctggccgagcccgacgagctcgtgccgcgcgatcgcacctccctggatggctcgatggacgcggtggtgcgtcgccacgatggcgagaaggaggccatcgacgcggtgcgtgccctgcgccggcgcgaactgctcaggttggcgctgggcgatgtgctgggccgcatcgacctcgacgccctcggccgggggctcagcgacctggccggtgccaccgtgggcgccgccctggccgtggcggtccgtggcgaacccgccggggtgccgcccatcggggtggtggcgatgggacgctggggtggcgccgagatgagctacgcctccgatgccgacgccatgtacgtggtgcccgacgacgccacgccggcgcagatcgcggccgccatcagggtggtcgccaaggcagcgtcgctgctgcgcctgcccggtgccgacccctccctcgagctggatgccgacctgcgccccgagggccgtgacggggccatggtgcgcaccctgggcggctacctcagctactacgaccgatggtcacagacctgggagcaccaggcactgatccgcgccgcctacggcgccggggacgaggacctcgtggcgcaattccttgccggcatcgaccacctacgctggccgcccaacggcttggacgccgatgaggaaatggcgatccgccgcctcaaggggcgcatggagaccgagcgcatcgagcggggcaccgatcgtcggcgcaacctcaagctgggccccggtggcctgtccgacgtcgaatggacggtgcaactgatgcaactgcgtcacgccggcaccgtcgaatccctgcgcacgccctcgacgatgatggccctggacgcctgcgagagcgagggactcatgaccaccgacgatgccgccgtcctgcgtgacgcctggcagctcgccagccaattgcgaaaccacacgatgctggtgcgcggacgcaccagcgaccagctgccacccgacccgcgcgacctgtcagccgtcgcggtgcagttggggcgcaacaagggggaggcgtccctgctgatcgacgaatacgagcgcaccacccggctcgcgtccaaggtcgtggaccgcttgttctgggggcatgcggagtgagcgggcaggcacgccacgccactggcccggagcccacgccggccgacggctcactggtgctgttcggcggcaccagtgacatcggcctggcgatcgccgaggcgctgttgggtgaccggcccggcccggtcaccctggtggcgcgtccgcaatcgccgagactcgcccgggcccgggcccgcatggtcgccgccggcgccaccggagtgcgggtcgtcggcctggacgtccgtgacctggacgcccacgcggacgccgtggaccacgccatgcacgacccccgcgcgccgcaggaaccggtgcgcacggtgatcatcgccttcggggtgctgggcgacccggaggccgcctggcaggatccacgacggacacgtgcgatgttcaccgtgaacaccaccgcggcagccagcatcggcgcgctggtggccgaggccctgcgcgcccagcgtcgcgggggaggcccggcgggacgcatcatcgccgtgagttcggtggcggccgagcgcgtgcgacgctccaacttcgtctatggcgccagcaaggccggcatggacggcttcttcatcggcctggggcaggccctggcgccggagcacatccgggtgctggtggtgcgccccggattcgtccgttcggccatgaccgtcggacgccgcgccggcctcgccgtggatcccgatcgggtcgccggcgccgtggtgcgcgctctggacacggaccgcgccgtggtgcgcgtgccccggatcttcacgccgctcatggcgatctatcgcaaccttcccgatcggatcgcccggcgcctggcgttctgagggacgccccgcgagggcctcagccgtcgtggggaagggctgcggccatgccgtcgaagatgaggttcaggccggcggcgaagcttgccgtgccatccatgaccggcgtgggggacgcctcgccggccagcgcccccagctgggcccgctgttgctcctcgtcgacgtggcccaggatgaagtagatgagcgtctgtgaggcggtggtcgcctcctggtcggccatccccatcgcggtcagcaccgcggcgggggcccgggacagttctgtcccggccaggccgatggcccgcatggaggccaccaggtcagccgaatcacgatggtcgagcaggcgggcacgcagctcggtggcccagccacgaagtgatgggcgccacgggtcaccgtccgccgtggcatcgagctcggggggttcgagcccggccaggatcttgtcgacgagctcggccaacaggctctgcttgttggcgacgtgccagtacagggcgctggccttgacgtcgaggctgtcggcaaggcgccgcatggtcaggtcattgagcccataggcgtcgagaatgcccaaagccgttgagatgatctcggtcttggtcagtgccacgcccccacactatggcagtcgcgcgggacgacgggagccacgccggagtacggcagtccacccgtcaggcggggcccgaagcccgggctgctaccccagcgaggcgtagaggtcattggcgaaggccgccagcgtcgcgacgtccgtgccggtgccggtgacctgcagcaggccgtcgtccatctccaccacgcaactgacggagttgtcgatctgggccaacgttccacaggtgctcaatccgtggagggtcgggccgacgagcagtctcagctgggacgccgcatagcccctgtcctcggtggagaccagggtgatgatcctcgtgccggcaccggccggcccctggtagatggccgtctgcagcgtcgcccgcgcgctgtcgatctgcgtggcgctggcgctcggagcaggagaggtggtccacccctcgaagctggcgggaagggttgcggtcgtcgcagccttgcggctcgcgctggggctggcggacgcatcgggcgtcggggtcgtcgcgtgggaccccggggttgacgcgggtgccgtcgacgtggacccgccacagccgctgagcgccaccagtgcacaggcgccggccagggccacggtgagggcgcgtcgtgcgagggacatgtggttcagtatgccgctcggcacccgcacccgtacagcgccggccatgaagtgccaccgtcatgtcaaccgatagcccatccctatgtggcacacagctgcagggttcagattgtctggtggttagtcaccggtttgaagccggaaggcgccgtcgaatcggcattcgcggcgcctcccggtgtcggaccgcggtggtttccccagctccgatgtgaaacgtccgtcaccggttttccggtgacggacgtttcaacggggaactgcgcattgtcatgcgccggggcagaactcagatctggtagtacaggtcgaactcataggggtgcggacgctgggccagctcggccaggtcctggcgcttcagcgagatccaggtgctcagcaggtcgggcgtgaacacgtcgccggccagcaggtagtcctggtccttctcgagctcgtcgagcacctcgcccagcgaaccggggacatgctgcacctggtcgtactcctcgggcggcagctcgtagaggtccttgtcgatcggggccggcggctcgatcttgttctggatgccgtcgatgccggcgagcagctgcgcggcgaatgccaggtagggattcgcgctcggatcggggcagcggaactcgatgcgcttggccttcgggctcggtccggtgatcgggatgcggatgcaggccgagcggttgcggttcgagtacacgaggttgaccggtgcctcgaagcccggcaccagacggtggtagctgttcacggtcgggttggtgaaggccagcaggctcggcgcgtgcttgagcaggccgccgatgtagtagcgggccatgtcggacaactgtgcgtagccgttctcgtcgaagaacagcggctcgccctcattccagatcgactggtggcagtgcatgccggtgccattgtcgccgtagacgggcttcggcatgaaggtggcggtcttgccgtgctggtaggccgtgttcttcacgatgtacttgaacttcatgacgtcgtcggcgctcttcagcagcttgtcgtagcgccagttgatctcggcctggccggccgagccgacctcgtggtgggcgcgctcgatgatgagtccggcgtcctcacagtgcttgaccatctcgtcgcgcaggtcgccgtagtggtcggtgggggccaccgggaagtagccacccttcaccttgaccttgtagcccaggttgccgcgctcctcgatgcggcccgtgttccaggcagcagactcggagtcgacactgtagaaggactcgtggccgttggtctcgtagcgcacatcgtcgaagacgtagaactcggcctcgggtgcgaagaaggcggtgtcgccgatgccggtgctggccaggaaattcatggccttgcgcgcgatgttgcgcgggtcgcggctgtagggctcgtgggtgatcggatcatgcacgaagaagttgacgatcagcgtcttgtgctcgcggaacggatcaagccaggcgctggtgggatcgggcaccagggccatatcggattcattgatcttctggaagccggcgaccgaggagccgtcgaaggccaagccctcctcgaaagcctcgtgctcgagttggctggccggaatcgtgaagtgctgcatgatgccgatgaggtcacagaatcgcacgtcgatgaactcgacgccctcactcttcacaaattccagcatttcgtcgggcccgttgaacatgtattcctccgcagtcatggtccggaccccttcaggcccggcttgaggtgataagcacaggctagtaacgcgaagtaaccccgcgttgcgtccatgttgcagccacgttacagagtcccgacggggcctgcagcgatcggtgtcgggatggcccgccgaccggcgggcaggcgcattgtgctcagggacggggctattcggtctgttcgccgagttccagccactcgttctcgaggcggtcgatctcggcgcgcttgtcgtccacggcctgtgcccgcttcccgagctccacatagtcgctggggtccacggcggccatcgattcggtgtcccggtccacctggcgttgcagcttgtcgatgcgacgctccagcgcacccagcttcttgcgggcctcgtgctgttcggccccactcagctcgccggagtcctgcgcggcctggcgtgattcgcgacgctccgagctggcctcggcccgctcctcgcgtcgctggcccgcccgcaacctgaggtattcgtccacgccgccgggaaggtggcgcaggtgcccgtcgatcagcgcgtactgctgatcggtgacgcgctcgaggaaatagcggtcatgggagacgacgatgagcgtgccgggccaggtgtcgagcaggtcctccagggccgtcagcatgtcggtgtcaaggtcgttggtgggctcgtccagcaccagcacattcggctggcccagcaggatgagcaacagctggaggcgacgcttctcaccgccggacaggtcctgcacgggggtggacagctgggcgggggagaaccccaggcgttccagcagctgcgccggcgtgagctcctgggccttcgagcccgtgccgaaggtgtaggtggtctgcaggctctcgagcaccttgcgcacgggcacgccggtgtactcatcgagctcatcgaggcgctggctcagggtggccgtgtgcactgtcttgccgcgcttgacgcgccccgacgtgggctgcagctcgccgtcgatcaggctgagcagggttgacttgcccgccccgttggcgccgagcagcccggtgcgctcaccgggtgcgagctgccaggtgatgtcgcgcagcacccggttgtcgccgaagctcaccgagacatccagcaggtcgacgacgtccttgccgagccgcgagatcgccatcgattccagcgccaggggatcgcgcagctcgggtacatcggcgatcagctcgttggcggcctcgatgcggaacttgggcttcgaggtgcgggccggggcaccgcgtcgcagccaggcaagttccttgcgggccagattctcgcggcgggcctcgttgacggctgcctggcggtcgcgttccacccgctggagcacataggcggcgtagccaccctcgaagggctcgacgatccggtcgtgcacctcccaggtgagattggccacctcatcgaggaaccagcggtcgtgggtcaccacgagcagggcgccggcgttgtcgggccagcgatgcttgaggtggtcggcaagccaggtgatcgcctcgacgtcaaggtggttcgtgggctcgtcgagggccagcacgtcccagtcgcccaccagcacccgggccagtgagacgcgtcggcgctggccacccgacagggtgtccaccgagtcgtgccagtcgatctcgccgagcaggcccgacaggatgtcccggatgcccggatcggacgcccacacgtgttcgggcacatcaccgacgacggcatgggccaccgactggtcggccgcgagcgtgtcagcctggtcgagcacgccgatgcgtaccccgttgcgggcgatcacgcgtccctcgtcgggttgcatgcggccatcaagcagggccagcaggctggacttgccgtcaccattgcggccgacgatgccgacgcggtcgccttcgttgacgccgagcgtcacggcatcgaagaccacctttgtggggtactccaggtgcagggactcggctccgagcagaaaagccatgaagaaatcagggattcaatcgctgggggacgtcagccgcgcatcgcgcgacgtgagacgcgcatgttcccgctggtgggcagcgggcccttgggcagcggcacgcgcggacgcatcgaatcgagggccaccagacggtactcgatctcctcgatctgctcggcggacagcttcttgggcagcttcttgatgtagtcgtacagcttcggcagcggcacctggtcggtcccgttgccgatcatcacggtctgcacgtcgacgccgtagagcacctgccgatggcggcgggcctcattgcgcagcatcgtggtcgcggccttgcccttgccctcaccgatgaggatgagcccgccgggtccgatggcgcggtggacgcagttttcctgcttgtccagggcgatcgccatcgtgtagtgccacttcttcttgtccagcagcgacagcgccacctgggcgccgccggcctggtcggcggcgcgggcaaacgcggccttcttggcctggcgctgcagcacgaacagcgccacggtgagaccggcaagcagtccgagcaggatccagaagatcagcatggtgcccacgagcaggcccaccacgacgccgaccacgaccgggcccagcaccgcccctgccagcatccaaccgatgcgtggttgatgctccgcggtgagcttgtaggtctcgcggatctggcggatggtgccccagtcagaaggattgtcggagtgcttcttcgcctccttgagggcctttgcctcggccttctgcttcctggccagttccttggccgcctcgctcgccatcgctgtgcctccgtgctcgagtcaatggatggggccaccggggccctcacatgggcctgatcggccgccgatccagtctagtgcatgagtcatgcgcccccggtggggcgcatggcgggccgggaacgtccgcccaggggtgggccaccgggccgcgtcgcacacgcgtcgcgcaccggtgcacggggccagtgcacgggcgcaggaagggaggggcggggatgcatcatgcatccccgcccctcccttgtcaggtgcgcgatccccgttacggggtcgggccctactggttcagaccgaactcagccccgaagtcgccctcctcaaggcgggccttgacgaacgacaggaagcgtgaggcgtccgcgccgtccaccaggcggtggtcgtaggtcatcgacaggtacatcatcggccggatggcgatggtgtcgttgccgtattcgtcgctgatcaccacgggacgcttgaccatcgcgccggtgcccaggatggcggcattcggcaggttgatgatcggggtgtcgaacagcgtgccggtggacccgtagttggtgatggtgaaggttgcccccgacagctcgtcggggccgatcttgccgtcacgggcacgggcggccaggtcaccgatcgacttggccacgccaccaacgttgaggtcaccggcacccttgatcaccgggaccatgaggcccttgggcgtatcgaccgcgatgccgatgtcctcggagtcgtggtaggtgatggttccggcctcggtatcgatggaggcgttcaccttcgggtactggcgcagcgcctcggtggccgcctgggtgatgaaggccaggtaggtcaggccgacgccctcgcgcttgcggaagtcgtccttcgccttggcgcgcacccgcgcaacggccgacaggtcgacctccaccgtggcggtgagctgggccgaggtctgcagcgactcggtcatgcggctcgccacgatcttgcggaggttcgacatcttctcagtggtgccgcgcttgccggcatccggcgacggtgcggccttgggacgcgcgggggcggcagcggccttctgcttggcagctgcagcgtccaggacgtcctgcttgcggatacgaccacccacgccggtgccggtcacctggttgaggtcaacgtcgttctgctgggcgagcttgcgcaccaacggggtgacatagccggtgaacgcggcaccctcggtggcccggggagccggtgggttcaccgggacggccgctgccggggtcggcgccgcgggcggggccgccacaggggcggacggggccaccggggccggaggggcaacgggggccggagccgccacggggactgcgggagcaggcggggcaacgggtgcggcgggtgccgcaggggcggccggtgcagcagccggtgcagcaggcacggatgagccgacgacgccgagtacggagcccacctcggcggtctcgtcctccttgacgtggatctccgtcagggtgccggcgaccggtgaggggatctcggtgtccaccttgtcggtgctgacctccaggagcggctcatcggcctcgaccggatcaccgacctccttgagccagcgcgagacggtggcctccgtgacgctctcgccgagctcgggcagggtcaccggggtgccctggccggcaggtgccgcagcgggtgccgcagcagcgggtgcagggggagcaggcggggcgaccggggccgcggcggctgcgggaatcgggggcggcggcggaacgggcgcagctgcgggggcgggggctgccggggccggtgcgcccgcaggagcctcggccgggtcacccaccacggcgagcacggcgccgaccggcgcggtgtcgtcctcattgaacttgatctcaagcagggtgccagcgacgggcgacggaatctcggtgtccaccttgtcggtgctcacctccagcaggggctcgtcagcgtcgacgtggtccccaacttccttcagccacctcgagactgtggcctctgtgacgctttcacccagctcgggcagtgtgacttcggtcgacatggttctacgtgactcctttgccagaaatctgcagcattgccaagggtctgcagctgctcacaccgggtcattccggtggacaggctcagcctaacgcgagcacgctcctgttgccgacccctttcggtgactgcggggggcacgctggcagcgaacacggggctcgggcggcgttatcgtcgcccggcgcagtgccgcggcccgatggcgctgtcaccgcaccggcacgatcatcagcgcgatgaggggcccgaccgttagcgtatggggcagaagaccgatgtcgcgaaggagcacaccatggccgattcaaccgattccctgcagcgctctccgctgaatgagtgtcacgagaagctgggcgcaaagttctccgagttcagcggatggctgatgcccctggagtacgagggccacggcgtgttggccgagcacaaggcggtgcgtgacgcggtgggcatcttcgacgtctcgcacctgggcaagatccgcgtgaccggtcccggggccaaggactacctcaacggggtgcttgccgctgacctgaacaagatcgtgcccggcaaggcgcagtatcagttgctctgcacgcccgagggtggcgtggtggacgacatgatcgcctatctgctgggcgacgacgatgtcttcctgatcccgaatgccgccaacaacaccacggtggcgcagatcctggccgaaggggcaccggagggtgtcaacgtggtcaaccagcaccacgacttcgcgatcatggcggtgcagggccacaagtcccctgatgtgctggccacgatgggccttcccaccgacatggactacatggcctttgaggtggtgccggtgggcgacagcaccttcacggtctgccgcaccggatacaccggcgagacgggcttcgaactcgtcgtgccctccgaccatgcggtggccgtctgggaaaaggtgttggaggccgggaagcccttcggcatcgtgccctgcggactggcggcgcgcgacaccctgcgcacggagatgggctactcgctgcacgggcacgagatctcgcccgagatcgatcccgtcagtgccggactgacctgggcgatcggctgggacaagccggatttccggggagccgaggcattgcgcgccatccgggccaacaagccggcccggcgaaaccgtggcctgcgggccgtgggacgcggcatcccgcgcccgggcatgtccgtggtgcccgccggtgccggcccggacgccgagcccatcggcgtgctgacctccgggaccttcagtccgacgttgcgcatcggcatcggcctggcgctgatcgacacctccatcaagccgggcgacaaggtgggcgtggtggttcgcaatcgtgtcgaggagttcgacgtggtgaagccgcccttcgtgcagccccacgtccgctgatggtgcgaacggccttcccggtcatctgacctgcgggcgggggcccgtcggccggtggggtccctgacgatgatgatgcggcccggaccaattggtccgggccgcatcatcatgaatgggtggtcgtcggcccgccgtggggcagtggtgggtgtcaggcctcttccaggctcatcgaatacgccagctggtcgccgtcgtgcaggctcaccgaggtgatgccggcgtccgagagctcgccgtaggcggcagtcagccaggcctcggcgtcgccctggctctcgaagggctgacccaacccgagggccttcatctcatcgtcggtcaggtcgctgtccgccgccggttcgccggtccagatgaatgccatcagtaggcctccccgcgcttgatcgccgggcccggattgcggaagcggcgcatggtgatcatgcgcgacatcatgtagccgatcaggcccttgccgcgcgtggtgaagcccgggatgcgctcggtggcctcgcgcttgtagctgcgccagcgccaccacacattgaccgcgcacaccaggaagaacacccagatgcccagggtgcccaccagcgacagcaccggcaggatctgcgtggccagcacgcaggcgagcagcaggaagacgaccggccaggcgaactccgccacggaccagtgggagtcgatgttgttgcgcaacagcacgcgctcgggcatctcctccaccttcttgtactgctcgtcgcgcttgcgggcgcgggcctgccggtcgcgggccttctgttccttcttggtcagcacggggtgcagacgctgcatgcgggcctgttcggcctgcttgcgcgtgggggtcggcgctcccttgcgtccggcgtcgcgctcggtctcctcgtcaaccggctcgaccgtctcgcgtgaacggctggttgccactgcgcacccctttgatgttgctacgtcgatgttcctagtggatttctgtgtccaagtctaaacggccgggcctgcctgctcgaccccggcgcccgggtgggccgtgttcgcgaagaaatcccgggattgatgggggacggtgggtcttggtgggcgcgcccgaaaggcggacgatggaacggcgggatggaacaatggtggtgacctgaccgttctgcggtgcaaccgctgcagaccacggcctctggggacgatgagtcccgcagatgacctatcccgatcggaaggaccgatagcgcatggctggcatcctcgaacggctctcgatgatcttcaagtccaaggcgaacaaggccctggacaagcatgaggatccccgcgagaccctggactattcctacgagcgccagcgggaactgctgcagaaggtacgtcgtggcgtggccgatgtggccaccagccgcaagcgcgtcgaactgcaggcaacccagctcgggcaggaaatggacaagctcaccctggccgcccagcgcgccctggcccagggacgcgaagaccttgcccgtgaggcactgacgcgcaagtcggggctccagggccagctcgccgacctccagacgcaacacgcgtcgctggccgccgaggaggagaagctcgtgcgggcctccacccggctgcaggcgaaggtcgaggccttccgcacccgcaaggagaccatcaaggcccagtactcggccgccgaggcccagacccgcgtcaatgacgcattcagcggcctgagcgaggagatgggcgacgtcggccaggcaatccagcgcgctgaggacaagacccagcagatgcaggcccgcgccggtgcggtcgacgagctgatcgcgtccggggcgctggaggatcccaccgggatggtgcaggacgacatcacccgggaactggacgccatggcgtcggggtccggggtcgaaagcgagctggaggcgatgaagagccagctcggcattgcgggcccgggcaccaccggcgcccagcaggtacagcccgggttcacttccccggcgatcgaggcggatcagcagaaggggcaacagcaatgatcgtgcgcatcagtggcgagggccagtgggagcttcccgacgacgccctccccgaattcaacgaactcgatcgtcagatcgagtcggccgtacgggcccaggacgccaccgggctgggcctggcgctgcgtgaactcgacgcccgcgtcaggcgccagggcgtggccatcgacgacgatgacctgcgcgattcggacctgatcatccccggtcccgattcatcgctgcaggatgtcgccaccatgttggcctccgacgaccgccccgatgggctcttcccgggctgatcggtgcgagcactcgttgctgcggggcggatcggcgaccacgacggcgtggacgccgccgtgctcatcgggcgtgcctggcggtccgccggtgcccacgtggccgccctcggcctggccgagccgggcgccgattgggcgcgtgcccaccgggcactgtgtcccgacgatccggcccactacctgtcgctgaccggccatggccccgatgccatcgtggcggccatggcttcggtgggcgtgtgcaatctgccccggcactggtcgccgacggtggacatgtcggccatggacttcgatgtcgcactcgagcggcagcgtcagcggcgcgcccacggcgtcgagttggtcggcatctgcgccgcggaccagaccggacaactgctcaccggcccactcggactcgccggcacccggggcgacctgggccttgccgagcgacttgggctcgaccggggcctggagcactgggcacaggggctgcgggccgccgtggggagtggccccaccgggcaggcccctgccgggcccggacccggatccaccggtgacgacgcgtcaggacttccggggcgggtccccgggtcgggcgccggaggcggcgccggcgccgtggtccaggcgttcggcggaacggtgcgcagtggggtggacgtactcgcccgggccgcccggttggaacagtccatcgcccgcgcggacctggtcgtcacctcgtgcgatgtctttgacgtggaccactggggcagcccggtcaccgactatgtcgccgcgctcgccaacaagcacgagaagccggtggtggtgatcgcacggaccaaccacaccaacgagatcgggcagcgttcggtcggtatcgaggccgtgcacgcgatcggtgacgatgccgatgtgacgtccgcttgtggcggattcgcccgcagctggatctggtaggcactggaacccgtgggaacgggcacataagctgtgccacggtggtgaagccggcgcccacccgcagcgaccggccacaaaccccatgaactgatgcagcgatggcccggcgaccccggtgccgtcatggaacgcatggagacgaagggacatcgatatgtcagacacgatccaggagaaggtcaccggtgtgacgctcaccgatgctgccgcacagaaggcccgcaccctgctcgagggggagggtcgcgacgacctcgccctgcgcgtcgaggtgcagcccggcggctgctcggggctgcgctaccgcctcgccttcgatgattcacgcctgcccgacgacctggtggatgcctacgacggcgtcgacctggtggttgaccggctgagcgccccgtacctgggtggtgcgaccatcgatttcgtcgacaccatcgagcagcagggcttcaccatcgacaatcccaatgcgcagagcacctgcgcctgtggcgattcgttccactgacccgtcgtcgacgtgggtggtagggcctcggcactgctacccacgcagatgtgaaaggggcctctcccaattgggagaggcccctttcacatcattcggggttcgactcatttcggggttcggcgtgcccccggtgtgtcgtcaggcccagctgaccggcagcggccggccctcctcgtaaccggagggcgactgcacgcccacgactgccttctcatggaattcacccaggctgcgtgcgcccgcgtaggtgcacgacgaacgcaccccggcggtgatccagtcgagcaggtcctccacgcccgggcggaccgggtcgaggtacatgcgcgatgagctgatgccctcctcgaacagggccgcgcgggcccgctcgtaggacgactgctggcgcgtccgattgcgcacggcgcgcgccgaggccatcccgaagctctccttgtagctgcgaccctcggggtcgacgagcagggcgccggtcgactcataggtgccggcgaaccacgagccgatcatcaccgaaccggcacccccggccagtgcgagggcgacgtcacggggatggcgaaccccgccgtcggcccagatggcgccgccgaccgatgccgcggcctccgagcactcgatgacggcggagaactgcgggcgtccgactccggtctgcatgcgcgtggtgcacatggccccggggccgacccccaccttcacgacgtccgcgccggcatcgagcaggtccagggttccctgggcggtcacgacattgccggcgacgatcggaatccggatgccggtgcggtcggcgtaggcgtcacgcacgggacgcacctggcccagggccccgatcatgcgctcctggtgtccatgggcggtgtccatcaccagcacatcggcgccggcgcccaacagggcctcggcgcgggccgcggcgtcgccactgatgccaatggcggtgccgatgcgcaggcggccctgggcgtccacggccggcttgtagatgccgcatcgcaccgcacccttggcggtcatcacgcccacgagcttcttgtcgtcgtccacggcaatggtcagcttgtggcgcgtggtgtcgaggatctcgaagacctgctgcggctcggtgtgctggtccaccacggtgaggtcggtgagcatcacatcgtgcacctgcaggaagcggtccacgccctcggtctgggcaggcccgatcacgccgatcgggtggttctgctcgtcgaccaccacggccacgccgtgggcacgcttgttgaccagggccatttcctcgcccacggtcatggagggcgacacggtcaccggggtctcgaaggcgatcggggcacgcttgacgcgtccgatggcctgctgcaccacgtccacggggatgtcctgggggagcacggcgatgccgccgcgccgcgcaatggtctcggccatgcgtcgccctgagatggcggtcatattggccaccacgaggggcaggggcaggtcgataccgtcacggctggtgaggtcgacatcgtgtcgcgacttgaccgacgaacggttcggcgccatgaagacgtcgttgtacgtcaggtcgtacgcgggctgctgattgagaaatcgcactgctcaattgtgccgtgcccacacaagttctcatattcgaggtcattgcggggtcgtacatgcgcccggcggggtggcttttccccgctcaggggccacgctgatagcgtcattgggtccccgaggggctgttcggtcagggcaaccccgacgggccgtgcgcggtagcatgacgcgcgacaacactgtgatgcccagccaaggacggttccatgagtagtgtggccagctccgattccacgaacggcgcgacgccgctgaaggtgatcgtgtattccgatgaccgcacggtgcgccagcaggtgcgcctggcgctcggacgaaagatcgcccgtgacctcccggagattgcagtcaccgagttcgccacgcaggacgccctgttcgaggcgctcgaccacgagcactttgacctggcgatcctcgacggcgaggcagtcccctccggtggcatgggcatctcgcaccagatgaaggacgagctggcatcgccgccgcccgtcgtgctgctcatcgcccgccccaccgacgcctggctggccgcgtggtccaacgcggaggccatctcgccctatccgatcgatccgatccggctgcccgacacggctgccgaggtggtgcgtcgggcccgttccggtcaggccttcccgatgaagcccgaacccgagccggctcccggcagcgcgagccgtcacgctcccgacaagcatgaccagccccaggaaatggctgagtaatggcccaattcacgtgggccagcgtgctgaccggactgcttgaacacgacgacatggacgccgccgaggtgtcctgggcgatggaccagatcctgtccaacaatgcgagccccgtgcaggtggcgggcttcctggtcgccctgcgcgccaagggcgagacggttggcgagatccgcggcatggccgatgtgatgctcgacaaggccgtcagcctgaagatgcccaatgatgccgtcgatgtcgtgggttcgggtggcgaccgcgccaataccgtcaacatctccaccatggcggccatcgtcgcggccgccagcggccgtccggtgatcaagcacggcaaccgtgctgcgagttccatgtcgggcactgccgactgcctcgaggcgctcggcctggtgatcgacatcgaccccgccaagcagccccaggtgttcgaccaggccgggatatccttcctgttcgcgccgctttaccatgcgtcactgcgcttcgcggcgcccgcgcgcaaggaactgggcatccagaccaccttcaacttccttgggcccctggccaacccggcacggccacaggcacaggcgatcggcgtggccaacttccgcatggcggggctggtggccggcgtgctcgccgaccgtggcaatcgcggtctggtgttccacggcaaggacggcctcgacgagctcaccaccaccggcgagaccgacatctggctgatccgtgacggcgccgtccaccagacgacgcttgaccccgcggcactcggcctggcccctgcccgtcccagtgacctggtgggcggagacccggcgcacaatgcccaggtcgcccgtgacgtctttgccggccagaccggtccggttcgtgacatcgttggcctcaatgcggccgcggcgatgctcgccttcgacgggccgaacttcactgaaccgttggtcgaccagatgcgtccccgcctggaggaggccttcaccaccatttcgcagggcagggccaccgagctgctcgagcgttgggtggccatcagccacgaggttgccggagtgtgagccaccgcagatgatgcggctggccggacgggaaggaccctcaggggcgctggatggccagtggccctcccggggcagtggtcggggcacggcccgtcggtgatggcgtggccacgagcagcgcggggacgatcagcagcacgacctcgagcagcacgccgatccaaccgccgatgttgaccaggtcggatcccgcctggaacaggcacctgaccaggatcgccgcggcccctgcgtaggtgaggaagcggccggccaggaagcaccggcccgccggatggtcgtgggcgaccaacgccatgatcaaccccggcaccagcaacacggtggcgatgacggccatcaccctcacggggagatcgtcattgacggtgatcgtcagcgccgccacggcggtggatcccatcgccaccaggacccacaccgcggaaacgaccttgagccagaaatggcgtgcccatgtcatgggaacctcccgtgcctccgggctgtgccgccgagcggcgcaacggtgcttcgcccattgttgattggttggatcagcttagattccgacgttcgcagccgctggtggttccgggaagatccgggcagccgatggcgcgtcaggcgaggtgctgcgccagttgcgcaacccagggccccgcccacagggccggggcataggcgaagacgcgtcccgggccggccaccagccgatggatgacaccccacagtgccccgatgatggcggccgcgaacaccgccatgatgaggaaatcccacgagacggatccggtgagggcaccgacgcccacggccatgcgcacatcggcgaagccgatgccggcaccgaagcgccacagggcccagaacatggctccgagcgcgcaggcccccagggcagcaccgagcagggccgacgcatctccccacacgagggcgcccagccccagtcccaccgccaactcgatcaggcacaggcgtgtgaggccgcgcggaatccacgttgacaccgcgtcgacggtcgccagtacggcgaaacccgatgaccagaccagccaggccggtcgctgtgcgcccggggctgtcatgaggagcggctggcaggccaggcagatcaccaggcacgcggcgatgagccgccaggtggtcaactgcgcataactcggcttggtgtccgcatcgggcacgtccggtgcgggttccggctggcggggcaggagcacggcagcatggacgaccacgagccccagaccggcgatcagccacggcagggcggcccatgcagcgctggtcagctggtccatggccctgatcctagggccctgatcctcatgcggcccgtgccggggccggtgcgatggacgcctgatccgggccttccggcgccgtcatgagcgcgggctgtgccgcatcgcggcgccgcctcgcctgaccggcgcgcaacttctcggcatgcgattgcatggcggcgcggcaacgccaggtggtcatcgccgtgcagtgccggcggcgtcccgacgccagctcgatgaccagatggaccggcagggcggtcatcgtggagatcgtgcgcaccgtatggccgcgggcgatcagcacgcgcaggcagatacgggtggtgcgggccagttcggggcgggccgcccgggcgagcaggtagccggcgtcgcgctcccacaacgacagggcatcactgcgacgaatgcggggatgctcgtggcgagccgcccggccaaggcccaacagtgcacgcatcgtgcccgccggcacatcggtggccagcgcgagcacgcgccagtgccaaccggtctcggccatgaggcgatgggccatggcccggaagggtgccgcgtccacccaaccggtgctggcctccggggagtcgaggcccgccggggcatcgaagcccgccggggcgtcgccgggtgcgaccggggcagtggcgccgcaacccacgagatgcaggtggggcggcttggggttggcgatatcggtcacggtcgttctcctggcttgtgggggttctcaccctccttgcccttcgggacaaccgatttgtgaggcctggacctgttttcttaggagattctcaggatttcatggaccgtgccaggacggcggcgatgtccggtgggaaatagtcgggccccttgagtaccttcccgtcggcacgcaggaccgggtggtggtcggcgcccatcttggacatgttcgagcgctgcacctcggccagcacggccggcaggtcgatgcccatctccaaggccatcccatagatcacatagaccaggtcggccagggcatcggccgtggcgaccacatcgcgatgttcctcgtcgttgtccatggcggtggcgttcgcctcgtcgacgatgcgtcgtgccgtcgtgccgtagacggcttcgaacagctcgccgaattcctcggcgatcaggctcatgcgcaggggcaggctgtcgcgccgcaggttggggccgtcgtcggcgatcgggcgaccgtagaggcggtggaagcgggcgacgaggccctcgggggagtcaccctcgcggatcgcgacggaatcggtggggaccgcggcctgctcgtaggcggcggtgtccccgtgcgcgatcggaccgtcccatggcagggccggactgcgcgggtcgtcgggcaacaggtcagccagccagttgtcgtggcgcaggccattgttcggctggctggaacgggtgcgcccctgcttgtggaatccgacgtgccaggccacccgccaactggcccagttgggcacatcgccattgaagtcgcagcgccacacgatgcgctgggcgccgatcgggcccagcgggtcgaaggcggcatcaagcacggcgttcactgcccgcgacatcaacccgcgcgcccgatagggcctgcccatccagtagccgacctcccagttgccgccgccacggctgaacagggtgatcatgcccatcagggtgccccgagggtcacggatgccccacttcaggtcgaaacccagccgccagtcagccggcgccctggtgcagaaggtttcggcatcggcatacgtgtaggggctgggaaccgtcgtccagcgctggatctgtgggtcctggcagaacaggaagaccttgtcgatgtcctgggcggtgggcgtcgacaggaccagacccggggcgtcgatggtgaacggttccatgcctcatgaccctaacttgtcgggggtgcagcgatcatcgcgtgccgccctgcaaccaccggcccgggtgtggccggagcgtgaacatgacgacggccgacatcccagctggaatgtcggccgtcggtcaccttgacgcggcgaatgcggtcagggatcgggggaaaccggacctcattcgccgctggatcagcgggaggccttggtgaagcctgcggcttcggcctcttcgatggtcttgaaccacacgtcggcgttggtgcgtgaatagcccgcaccaccgggaacgtggaacttcatggagcgctcattgcccttgatcgtgtatccctcgggcggattcgcgccacggtagccggccccgcccttcgcggcgtcaccggtctcgtgggagtcgttggcctcatcgagctcggtcggctcggcatcgccggtctcctgcttggcgacatcgggctgcgccggtgcggccttgcgggccccggcggcaccctgcggcagatctgaggcctcggtgctcaccgtgacatcggcgggctccaggtgctcggtggccgtgtccggctcggtgaacttcacggcgccaccgggttcggtgtcagccgagtcctccttgggacggtcccgacgggcctcgccggcgtagtcgtagctggcgtcgttgtcggtgtaggcagtgctgggttcctgcggggtccagccatcgtccttgggaagcaacagctggcgcaccgccaccacggccccaccgagcaatgcggcaatccccaggcccttcaggacccggtggtgcttcttcttgggtgccacctggacgacggatgcatcggcccttgacttcagattctccacgacatcgcttcccttgcgagcagccttcgcgacgtgctcgttctcgcttgccctatcgacgaattccctgacccggggcttgacgttcttgtcgtagccctcggtgacggcgtcccgtgtcttctcgtaatagggggccaccttctcggcggcctcggccacatggggtgccacccggtccaccgcgtcagccaccaggggttcgacgcgttcgcgtgcgtcagccaccctggggctcaggaatgatgtgatccttcccacgacgccacgcgcggtggcgacggaatcgttcaccgcatcgcgggcgttctcgccggcggcagtggcggactgcttgaggtcctcttttttcacagtgtcctccgatactggttgtgctcgtaatcgagctgctcgtgatcgagccgtcttccacgctacccatgtcgggtcacccggcgaagggggtcgggtagtggctcagggtgatcgacgaccgtgagccacatctgccggtcagggccggttcacgggcacaccacagcgtgtgcccagcgagcgatgtcgtccaccggcagtgccagcccggtaccggcgcgggaccgtcggatgcccgtgcagtgcaggtcggatgccggggtcggtttcgcgatgctggaatgatgggggcatcacatccgacagcggaaaggggcctgcccatgacgcaagccatcctgcacaccaatcacggcgacatcacgatcaacctgttcgatgacttcgcgccgaacacggtgaagaacttcgtggagctggccaacggcaccagggaattcctcgacatgaccgacaaccagcgcaagaccgagccgtactacgacggcacgatcttccaccgcatcattgatggcttcatgatccagggcggcgaccgcaccggcaccggccgtggtggtcccggctatgagttcgccgacgagttctaccccgacctgaccttcgccaagccctatctgctggccatggccaatgcgggcccgaacaccaacggctcacagttcttcatcaccgtggcccccacgccgcacctgaacatgcgccacagcatcttcggtgaggtcgccgatgacgcctcgaagaaggtcgtggacgagatcgccaaggttcccaccgcgcgcggggatcgtccggtggacgacgtggtgatcaattcggtcgagatcgcccagtgaccggggtcgccctctgatcggggtcgccctctgatcggggtcgccctctgatcggggtcgccctctgatcgggattgccccctgcaaccgggggcgacccgtggggagcgcgccggcaatggtgcggcttcccacgggcccgagggccatctgaatcgccgtgtaccatatggtccacggcgattcctgtccccgggacggtgacccgctcctgcgccggccggctacagcgagaaggcggcctcgaggtcgtgctcactgtaggcgcggaaggccaggtgggtgtcggtgtcgatcaccccgggcaccttcttcagctgatcggtgatggccggcgcgatctcctcgtaaccggccacccgcaccatgacgacaaggtcgatgtcgccggtcaccgagtagacctcggtgacgtgctccaggccggcgatctgctcggcgacctcggagatgcggtcgttgtcggcatggacgaagacaatcgcggtgatcatgttcgcatcctaatgctgcgggctcggcaggggccgaacggcatccggtgtcgccggccgcatgtgccggctgaccagcggaaatgtcgggctgtggccatctgtgcgccacatcgggtcccgagcggtcgtccacaggtggtctccggcattgctactttcatgagatttctctaagatttccttagattcgcgctgtcttccgtggcgaatcggccccgtcggggtatttcgtgagtgatcacagcgaggaaatcgaatggcgatgagggcacgtcacggcgtcgtccggcttggtctggtctgtctcaccgcattggcggttttcggcacggcaaatgtgtcgggtcaggttgcggtgatggctgagggcactgatgccgcggtcagcaactccaccgtcgatgcggcacaggcaaagctcgatcagatcaagtacgacagccaacaggtcgaggccgactaccagacgtcggtgaagaagcagcaggcagcccaggacgcctacgaccaggcgaccacccagatcgccgaggaacaggccaagctggacgccctgcggggcgatgccgcccagatcgccctgagcaactaccagggggcatcggttccgcagaccacacggctgctgaccagcgacgacacccatgacctgctctccgagctgtccaccgtgcagtcgatcaacaccctgaccgccgagaagatggcccgctacaacgccgagaagtcgctgctcgagtcactgcgtgaggaagctgtggcctccgtcgacgaggtgaggaagcagaccgaccagcaggcggcgctgcttgcgaaggcacaggaccagaccgcacaggcccagaaggtgcttgacgggttgaccaccgagcagcagaagcaggtgatcgcggcccaggccacgaaggtgcaggtgggcacatcggtgtcgaacggggcctcgcgcgacgccagccgcagtgacctggcaggcatccgcaccgccatcgccaagcagaaggtctggccggcctccggcgaactcgtgtcgagcttcagctcgcgggtcaatcccatcggcggatatgccgaattccacgacggggacgacatcgccgcggcgtgcggcgaaccggtgcaggccgcgtggggcggcacggtgctggccgccggaatgtcggcggctggggcaaccgcgtcgtgatcgaccacggcaacggccttgcgaccgcctacaaccacctgctggggttctcggtgtcgcccggacagcaggtcaacgtcggcgacgtcatcgcgcgcgtgggttccaccgggaactccaccggatgccatctgcacttccacgtgatcgagaacggcatcgccgtcgacccggccccgatcttcggcaagtaacctgcgggtaccggccccgttccggctggtcgggttccatctggcgaaaccgccagcgtggtggttttaccgtccacttcggtggccaatagggttacagggtcaaggaggcggccgtgtggtacaccctgttcaaataccttttgttcaggccgggggtgaagctcttgctccacccgacgctccagggtgagcagaacatcccccgacagggcggtgccgtgctcgccagcaaccacctggacatcgccgacaccctggcgctgcccgcgctcatgaggcgtcggctcacctttcccgccaagaaggagctcttcgaggggcggacactgtggggacgcatcgtcgcctggttcctcaccgcagtgggcatggtgccgttggaccgttcgggtggccgggcaagcgccagtggccttggcccgatcgatcaggtgctcaccgacggcggactggccggcatcttccccgagggcacccgctcgcccgatggatccctctacaaggggcataccggggttgcccggatggcactcgacatgcaggtgccggtgatcccggtcgccatggtgaacacgaccgtgaggcgcaaccgcctgggcctgcccacgatgcatgacggacgcatgatcatcggtaggccactggactattcgccgtggcgccaccagcgcgacgacgtcagggtgttgcgctggatcaccaacgacgtgctggcccatgtgcagcagctgtccggccagccctatgtcgatgtctacggcttccgcgtgaaatatggcaacctgcgcgacgccgacctgacgcgcttccgcaaggacagcccgaccgccggattgccggtgccacccaccgacgccgagctgggcctggcagggcacgatgaggcgggttccccggcgccttcgccccggggaaccgaatcgggccccggtgatgacaaggatgttcgcgatgagtgacactgatcgacctgatgcccccgcagtgcgtgatgcgcccaaccatccgcaactgccggagtccaggccccccacgctgcgcggcagcctcagggccgctgcccgggccgccggattcacccgcggtctcttccgtggcacccgggaggcactgacggcccatgtcgagggggtcgagaacatcccggagggtgctgcgatcctggcctgcaaccatcggctgccgtccgacttcacacggctggaggcgtcggtggagcggcccgtgcggctggtggacctcaacccggacgtgcgcggccgtggcaagcgggcccgcgccattcccctggagggggcggccccgggacatcccgacgcggtatcggtgctgggggagggcgaattggtggtcgtcttccccgagggtgatccgtcgccggacggacgcctgcacaggggcaaccccgaggtcgcctggctggccctggccacgcaggtgccggtggtgccggtgggcatcgagctgcccgagcgcgaggggatgggtggacgcaccctgtcgcggatgctcggcccgaccatcgccttcggtaagcccctggacttctcacgctattggaccagcccggccctgtccgacgccctcgacggggtgttgctgcgcggctgcaccgccgagatcatggcggccatcggggaactgtccggccagctgtaccaggacgacacgcccgcccaggccaaggagctgatccgccaacggcgtcatcgcgaggccgaggaacgcgccgacaactaccccacgctgtgggaacagcgccgtcgggccgccatcgagcgcgaacaactgcgcgtggaggaccagcgcgacctcgaacgtgccgcggccgaggcggcccgcaatgcacgacgctatgccgacggtggtgcgggcgagcgtccccggcgctgaggcccgtcgggcccgccccgtgtcgggttctgcggcctcccgggccctgcgatgacgctcacggcggacgcggggcggtgtgtggcgccggcgcattatccttgggcccgtgcccgaactgtttccgtcgttgttgagcctgcgcgatatgccccaggtgcagcagccgcactatgccgacgcctccgccgagaagcgcgtcgtcgacaagttgcgctcgctgccgccactggtcttcgccggtgaatgtgatgacctgcgcgacaagctcgcccaggtggccaacggcaaggccttcttgctgcagggtggtgactgcgccgagacctttgacggcgtgcaggccaatcccatcaaggccaagctgcgcgtgctgcttgccatgagcgtggtgctcacctatgccgggcaggtgccggtggtcaagctcggccgcttggccggccagtacgccaagccgcgctccaaggacaccgagacccgcgagggcgtgacactgcccgcctaccgtggtgacgccgtgaacggcttcgacttcaccgcccaggcccgccaccaggacccggagcggctgctgcagatgtacaacgcgtcggcggccaccctcaacctggtgcgcgccttcgtcaagggcggcttcgccgacctgcgccagctccatgcatggaatgccagcttcgtccgcgactcgcatgtggagaagcgctacgaggagatggccggtgagatcgaacgtgccctgggcttcatggaggcctgtggcgtcgatgccgagaccatgcgcacggttgacttctacgccagccacgaggccctgctgctcgactacgagaacgccatgacgcgtatcgactcgcgctcgcaggagccctacgacacctccggccacatggtctggatcggcgagcgcacccgccaacccggtggtgcccacgtggagctgttgcgcagcgtacgcaacccgctgggcgtcaagctcggcccgaccgccaccgccgaggatgccctggagatcgccgatcggctcgatccggagcgcatccccggtcgcatcaccttcatcacccggatgggtgcgggcaaggtccgtgacctgttgcccgcactggtcgagggggtcgaggcctccggccgcaaggtcgcctgggtctgtgatcccatgcacggcaacaccttcgagacagctaagggctacaagacccgcgaatatgctgcggtcgtcgacgagctcaacggcttcttcgacgtgcacgagcagctgggcacctggcccggcggggtgcacgtggagctcaccggcgacgatgtcaccgagtgccttggtggggccttccagctcagcgaggaagacctcgccagccgctacgagaccacctgcgatccccgcttgaaccgcaaccagagcctcgagctggccttcatgatcgccgagcggctcaatgactaccgcaaccgctacgcggcagcaccggtcactcctgactggaatgcctgagcacagcaccgaacccggataggcacaggcatgggggagtccgcgacggcggtctcttcccatgcctgtcatcaccggggcatactcgtgggacagcgcacgcaggcatagtggggacatgaagatcacccggttcggacattcctgcgtgctggtcgaggcgggtggggcccgtgtgctgatcgaccccggcgtctactcaaggggctgggagtccatcgcgacgcccgacgcggtgttcatcacgcaccgacatgccgaccatgccgatccggtccggctgcccgcctacctggccgaccgccccgacctgccctgctatgtcgagccgggggtcaacgagcaactcatcgtgcccaccaccactgccatggcgtccggacagcagatcatgctcgggcagctcaccgtcaccgtggtcggcggcctccatgccgtgatccatccggacatcccccgggtcggcaacttcggactcgtgctgcgtgcgcccggagaaccctcggtcttccaccccggcgacgcgctcgacgtgacgcccgatgacattgacgtgctctgcgtgcccatgatggcgccctgggagaaggtgtcgcagaccatcgacttcgtgcggggcgtggtccctcgccagatgatcccgatccacgacgggctgctcaacgacgacggcttctggatgatcgccggccacctgtcggcccgcaccacggcccagttcgtgccggtgcgcgatcctcgtccgtggaccgtcacccgggggatcacgctctagcccgtccgtgggtcaggacacggcggcgggtggtggatcggtgcggcgtcgcagtgggggaatgcgcaccgccagccagatggcacccatcatgagcgtgccgccgaccaccgtgcgcacgctcaggtcctcctgcccggcgagcacggcgaagacggcggcccacagcggttcggagctcatgatcaccgccgcccgactcgcctccatgcgtgcctggccccatgcctgcaggaacagggtgagggcgccgcacaacacacccaggtagatcagggcgccccattggacggttccacggggcatcgtgatgccacccggagccgccaccgccaacgaccagacggccaccgtggccgtctgcacgatcgccaggctcatcacccgctgctgggcgatgaacatgtcggtgagcacgatgtgcgcggcgaagccgacggctgcggcgatggacaacagctcgcccaggcccagccccccggccgcccccggcgccagcgtcagcacgcccagtgcggccgtggccaggccgaccgagatccacacccggggcgggggattgcgtcgcaggatcagcgccaccatcacggcggtgaagaccgcgtacatgccggtgaggaaacccgacaccgatgcggaggtgcgcacgatcccgaacatcaggaacaactgggcgatcccgtaggccgtgcccatcgcgatgccctgcaacagggtgcgacggctcatccgcagggcccggggggccaccagggccagcacgatcgccgacatggtgaagcgcaccgccgtgatgtctcccggtggcatcatgcccaccagggccttgttcatgaaatagctcgaaccccacagcatcgcaatcagcagcagggccgacgccgccggcaggctggaagggcggcgggccgccggatgctcgggggcaggactcacagggtcaatctacgcaggtcgcggcggcgtccgggaacatgtcctcagatgatgaagatcttcaccgtggtgcccttgggcagcttggcacccggatcggggtcggtgcgttgcacccgacccaggcgaatgcgggcgtcgggatcgaccatcacctcgtcgacgtggaagcccgcggcctccaacaccttgtgggcgtcggcggttgagcggacacgcacatcgggcacgtccgtgggggcgcccccatcggagacgacgaccttgacggtgtagccgggcctgagctcaccgtcggcgggatcctgcgagatcaccgaccccgaggccaccgcatcagaatgctgcgtgctgacgtcggccttcaaccccagggcgtccaacgcggcagtggcgtcatcgcgggtcttgccgctcagccccggcaccctcaccggagccggacccctggagaccgtgaggtcgaccgtcgcgtcgtggcgcacctgggatcccggtgtggcgctggccccgctgacgattccctcggcgtggtcggcgtcgtagtcctgccggatcgtgccgaccctcagatgggcatcggccagggccctggtggccgcatccttgtccagccccaccacggtgggcatgggatagctctgcggcccctgcgagatcaccgcgtgcagttcttccttgcgcaccatgcgtgaaccggcttcgggggtcgtgcgcaccacatcgccggccggcaccgcgtcgtcgtagtcctcggagaagctgatcgtcacgtcgaccttctgggcagcgccctgggctacggtgcggttcatgccgatgactgccggtgcgctgacatagcgtccgctggccagccaccacgacaggcacccgacgcccagggcgatgaggatcaccagcacggtggccacgatcccgcgccgacgacggtgcaccgggtcgttgaccagttcagggaagcgcggagtgcgaccactgcgcggcagctgggcatccggatcggccgccaagcgggcccggaaatcgaccggactcaccggcgtgcgtggccccgaacctgccgacatggcacgccagccggccgtcatgggacgcaccgggtcagccgtggagcgtgccgtgcggggcgtgggcggggcactggacgacgcctgccgggccgccagcacgtcaatgccacccgaattggtggcggagcccgtggaggcccccatcgtggccgccaggcgcggggccgggaccgccacggcagggcccgtcgcagcgccggccagctgctggtccgccacgtgctgggccggtagggcggcctgatgggtcgctaccggttcggtgtgcacgacatcaacccgggcggtgggtgaaccactccagacctgtgacgaacggaacgcggcaggattcatgatggccgacagcgaggggtcattacccacgcccgccgcaagcgccatgcgggcgcgccgcagccgggccagcaggtcgataccatcgcggggccgttggccgggctcgcggcgggtgcaggccacggtcagcgcgtcgatgtagtcgggcaccggggcatggttcgtgcgccgcagggtgacagagggcgggggcaccgccttgttcacgtgtgcataggccacctgaatgggcgtgtcacccgcatagggcttctccccggtgagcagctcgtagagcaccacgccggtggaatagatgtcggagcgcgcgtcggcatggccgttggtgaccagctcggggggtagatagctgacggtgccgatcaccagtccgtgtgccgcggtgacggtttgggccgtgaccgcccgggcgaggccgaaatcggccaccttcacctgcccgtgcgggccgatcagcacgttctcgggcttcacgtcacggtgcaccagcccggattcgtgggcggccgccagagccgccacgacgggctcaatgagttccagggcccgggccgggctgaagggcgcctcgcgggtgatcagattgcgcagcgtgcaaccctcgacgaattccatgacgatataggggcggccgtgatcacgtccctggtcgaagacacccaccacatggggatctgacagccgtgcgacggcgcgggcctcacgatcgaacttgcgggcaaagtcggcgtcatcgccgaggccctcatgcatcaccttgactgcaacgacgcgacccagtcggcgatcccgggcacggtaaacggtagccatgccgccacgcgcgagtttcctcacgatctcgtagcggccggctagcacgtcacccaccaaggggtcactcgtgctgtctctcgtcacagaaatgctccaaacacggtcgggggaagtaggccgtgtcagcccggttacatagtaggcgtcctgatcgtcgggggtgaacccgaatcagtgccggacggcgattcgcgcggtgggtcccggtcagaactggcggtcgaccgcagcatggaccaacgattccagggcggttcgtccctcgtcggtgatctgcagaccggacaatccccgcagtgcagcggcggaatcgcggtcgatccgtgcgttgagacggctcacggcgccgctgctccgcagcatctcccgggccgcgtccaattccgggtcggacaagggtcggcccaggtaatcggcgagtcggggttggtcgtgcagcgcatcgaccaccaggacggtgcgcttgttctcgcgcaggtcgtcgccggccggcttgccggtgagctcctcgtcgccgaagacccccagcaggtcgtcgcggaactggaaggcccggccgactgccgagcccacgtgcgccaggccgtcgagcagctgcgccggggcgccggccagggcggcaccgaactgcagcggacggatcacggtgtagcgggcggtcttgtactccaccacctgttcggcagtggccaggccagcaccgcctgccaggccgccctcggcagccaggtcgaggaattggccgacattgacgtcggtgcgcaccgcgtcgagtacccagcgcgcccgggcgaaggctgcggggtccagtccagcggtggcgaagcgctgtgtcgaccacgcggtgagcagatcgccgagcaggatggccccggctcgtccgaaggctgcaggatcgccgacgcccccaccgcggtgatgcagctcctccagctggcggtgggccgccggcatgccgcgtcgggtgtcggagtcgtcgatgaggtcgtcgtgcaccagcgccgcaacgtgcagcaactcgaagccggccgtggcatcaagtagcgccgtgggatcggccggtgcgccgccggccgccacatggccccagaagcagaacgctggacgaagtcgcttgcccccggccgtgaagcggcgtgctaggcccaccagctcagacatcagcggcgaaaccggcgccaattcctcatcgatctggtcaaggaacaagccgacccgggcaccgacggcatcacggaatgcgggaccagcggggtcggtgggatcgaaggcaggcatggacacgcccggaagcctagtgggcggctggatacgctgaccaacgtgctggacaactatcgacccgctgatctcgcccccgcccgacggagcaacaccgacaccacgcagacgattgccgagttgctggcgcgggccgagcgacccaccttcagcgttgagttctttccccccaagaccgatgagggcgcccgggtgttgcacgaggccatcgagaagctcgagccctggaaccccgatttcgtctcggtgacctatggcgccaacggatcgctgcgtgatcgcaccctggccgccgtccgcgacatggtggcgtccaccaagctgagggtcgtggggcacctcacttgcacggggcagagcgtggacgagctcaagtcggtgatcgacgcctacggcgacctgggcgtgcaccacatcttggccgtgcggggcgacatgcccggcgggccccgccagccctgggagccacatccccaggggctgaagaatgccaccgagctggtcgagttggtgaagagccgcggcgactactgcgtgggtgtgggggccttccccgacatccatcccggatcgacccccgagcaggatgtgcgcgtgctgcacgacaagcaggacgccggggccgagttcgccatcacccagctgttcttccgcccgagtgcctattacgacctgatcgaccggatgcgcgccgatggctgcaccctgccggtgatcgcgggcatgatgccggtgacggccatcagccagctcgacaagttcgccgagctgtccggggtgccgctgcccgccagcgtcacggagcggctgatggccgtggccaatgatccgctggccgtgcgcgccaccggtgcccagatctgcgccgagctggcctcggacctgttggagcgcggcgcgcccggcctgcagttcttcacccggaaccgctcggcggctacccgagagattctcgccattctcctggcacgccgcccgtggtgacgtccagggtgatcaggcgttgcgtcgggcgggtcagcgccacatagagcacccggggaccaccgggtgcctcggcaatgatctggtcgggattgatcaccagcgccgcgtcatattccaggcccttggcctgcagcgcggtgaccaccaacacccgatccgaacccggatcgaaggtgcgtacctcctcgaccgccgagggcggcacgatgacgccgatggttccctccacctggcccagcaggcgctcgatgagcgcgcgcactgtcatgtcgaggtcctccggcgtggtggccgcgagctccggctcgataccggtgctccgcaccgcattgggcaggtccgcctcgggcaggtaggtgcggatgaagcgtccggccaggttcatgacctctgccggcgagcggtagttcgtcgccagtcggaaggtgcggtggggcgcccgtccgatcagttcccgcatggcgcggtcggtctgggccgcctccgggtaggaactctgggccgggtcgccgacgatcgtccagctcgcctgtggcccgcgacgccggatcatccgccattgcatgggggtgatgtcctgtgcctcatccacgagtacgtgcgagtagttctgcagcagctcgtcgtcctcggtgtcgcgctggtccgacaacaggtcagcggtggtcaccagctcctccttcgtcgagtcgaggaagaggtcgggctcggtgctggcgggctcgggcagcgggccgaggatcatcgccagctcatcgagcagcgggatatcgctgaccgaccactgcggatgggccatgccggcggcggggacgtatccgcgggactgcgacagggactccgacagcacggcctgctgatcggcatccagcagcccgtgggagaccttcgcggccagcgtcggctcagccagacgggccagcacctgctcggcgtccaggggtggccaccatgcgttgacgaacatctgccaactggcctgggtggtcaccttgtcgtcgaactcgtcgcgctccacatccttggccagggccggcggcagcttggcatacagcgcgccgagcagtgcctgctcggcgatgtggcgggcctcgttgagcttgttgttcgccaggatcttgttgcgcattgcggccagcgccttggcgtcgagggtgaggatctcaccggagaaggtgacccgcagctgctgggcgccctgcgccaccaggggttcgttgacgagtcggcgcaacagcctgctcatcaccagggagcccttgaggatcgtggcctcggcgctgtcctgacgatcggagcccagccccagcacgtcgtcggcgacccggccgacgctgcgcagcgtcacggcgtcctcgcccaggccgggcagcacccgctcgatgtagttcatgaacacatcggaggggccgaccaccaggacgccgccgcgttccaggcgcttgcgatgggtgtagagcaggtaggcggcccggtgcagtgccaccaccgtcttgccggtgccggggccgccggcaatcgtcgtgaccccctggtagggggcacggatcgcctcgtcctgttcggcctggatggtggccacgatgctgcgcatgtgctggccgcgggcacggccgagggcggccatcagggcaccctcgccgatgacgaccaggtcggtgtcggcctcggtgtcgaggagatcgtcctcgatgccgatcaccttgtcgtcgcggcagcgcaggacgcgtcgacgcaccacgcccatcgggttgttcggggtcgcccggtagaaggcctcggccgccggtgcgcgccagtcgatgaccagtggctcgtagtcctcgtcgcgcacgccgagccgtccgatgtagcgggtctccttgtcgagcagcaggtcgaggcgtccgaagaccagcccctcatgctcctcgtcgaggatcgccagtcgtcgtgaggcctggtaggcgaaggcgtcgcgctcgaacagtgcggtgctgtcctcctcgcgcagccaatcagcacgatcgctggtgaagcgggcacggctttccgcctcgacattgcgggcctccgccatggccgcctcgaggcgttcatagacgtggtcaacatggcgctgttcgagctccagctcgtgctccagaatgtcggcgtcgtcgtgtggtgcagattcagtcacagtgtctcagtcctgtccacgggtcgatcaactttactccgcgtggcccgtggcacacccggctcgtccacaagccgggtgtgtcgcaggtggcgggtccacaggtaatggccatctatcgaatgggtgttcgaatatgtgctagctttcaggtcccggttcatcgacggggaagcgcttgatgagcggatcggaacggggaaggggcatgccatgcgcagctacgagagggcaatcatctgtgagccggtgcagggcacgccgcaccgcttcgtctggcgctcccggctctggcgggtcagcgaggtgcagcgcagctgggtggaggcggttccctggtggaccaaccccgatggggtgggcggcccggagggggagcgattcggcacgggcctgtccgccgacgaggcctggtggcgcgcagagggtgacgactgggcaagtcccgccgaaccatcccgggccccagtccccagctcgccggcccacgggctccggcggggtgcccggcagcgcacggtctggcgggtggtggccagctcgggcgaccgtcagggggtctacgacctggcatcctgcgagggggaatggtccctcatcgcagcagtggactgaggggcacccccatgagtcgaaggacagtcggcaggtcaggcggggaggaacggccccgcctccccgatcgtcggggtccggacggcatgcctgccttcgtgcacctgcgcgtcgcctcgtcatattcgctgcagtacggggccagtcatcccgaggaactcgtggcgggcgccgctgcggcaggcatgaccatgctgggcctcaccgatcgcgatgggctctatggtgcggtccgcttcgtgcaggcctgccagcaggcgaatatctcgcccatcgtgggagtcgacctggccgtggagctctgcggtgtgcccgatggtgcacgccgcgtgcggcccgtgccggtgaagggcggctcgctacgggacgagggcctgccgcgcgtggtcgtgctcgcccggtcgaaggccggctgggccgcgctgtgtcggctggtgaccggagcccatcaggcaccggaccgggctcgtccggtcgccaccggccagctgttcggtcagtgggccggtgacggtgggttgtcggtgctgttgggtccggattcgtcactgggcagggccctggccaaccatgacgaccatggtgctgaccgggagctcgcccggtggcggcaggtggtccccgacaacaggatcgcccttgcggtgagcgaccacctggggcgtgacggggaggcctcgttgccgcaggcggtggccatggtgaggttcgccgaccgtcaccgactggagtgcgtgctcaccaaccaggtgcgcatggccagggctgatcaggcgccggtctgcgatgtgctcgatgcggcccggctgctccaaccgctcaccatggggcgcctggggcttggtaccggagaggggtggctcaagccgtccgggcagatggcggcggtggcagcgcgcatcagcgacggtgccggccgtgatgaccgggggcgtcgcctgctggcggacaccagggtcctggccgaggaatgcgtgctcgatccgaagcgcgatatcgggctgggcgagatccacctgcccggtgttcccgacgcgagccgacgcctgcgggagcgttgcctggccggactgccacggcgctatcgagggaacacgaccatggtggaacagcgcctggatgccgagctcggtgtgatcgagggctgcaacatggcctcctatttcctcaccgtggccggagtggtcgacatggtgcgcggtgcggggctgcggtgcacggcgcgtgggtcgggtgcggggagcctggtcaaccatctgctcgggatctcgggggtcgacccgatgcgctacggcctgctcatggagcgtttcctgtccgccgagcgcgacaagttgcccgatattgacctcgacgtggaatcggcgcgccgtaccgacatctaccggatggtgctcgaccgcttcggcgccgaccaggtggcctgcgtggccatggtggagacctatcgggcacgccatgccctccgcgacgtgggggcggcgctgagcgtgccacccggtgagatcgatgcgatggccaaggcctttccccatatccgtgccgatcaggtgcgcaatgccctggcggagctgccggagctgcggtcggcgggtatcaacgaggaacgcttcggggtggtgcttgacctggtcgaagggctcgacgggctgccacggcacctggccctgcatccctgcggggtgatcatcagcgacaagaccctctacgaccgcagtccggtgcagaccagtgccagtgacttcccgatgagccagtacgacaaggacgatgtggaggagatgggcctgctcaagctcgatgtgctcggcgtgcgcatgcaatccgccatcgcccatgcccttgacgagatccgccacaccgagggtcccgaggaggttcccgacctcgaggagctggagcccttcgacgatccggaggtctatgaactgatcgaccacagccagacattgggctgcttccagatcgaatcacccggccagcgcgagctggtggggaagttcgcacccacctgcttcaacgacatcatcatcgacatctcgctgttccgacccggtccggtgaaggccgacatggtctcgcccttcctcgatgcccgtgccggatgggtctcgccgagctatctggacgagcggttgcgtccgatcctggccgagacctatggcgtgatcgtcttccacgagcaggtgatccgcatcatcgcggaggtcaccggcaagggattggggcgcgccgatgagatgcgccgtgccctgggcagcatgtcggccaagcccgcggtgcaggagtggttcttcaagtacgcccgactcaacggctatgaccagggccaggccacgcgcatctgggcggccctggagtcattcgcctccttcggcttctgcaaggcgcatgcggccagcttctcggtgcccacctatcagtcggcgtggctgaagaggcactggccggcacagttcctggcgggcatcctcacccacgatcccggcatgtatcccaagaggttgctgctcgaggaggcccggcgcatgaacatctcggtgctgggcatcgacgtgaactcttgcagcggaagcttccatgccgagccggtggaggccgacccgcagatgccggcgccgccggcaggcctccccgatgcccgggactggggcatccggctctccctggccgatgtggccggcatcaccgacgacatgatcggatccatcgtggcgggccagccctacgatgacctgtccgatttcttcgcccgctcccatgtcagtgcccccgtggccgagaacctgatcatggtgggtggcctggattcgctctacggcattgaccctgaccgcccctccggtgccggacgggtgacgcggcgcgacctgttgctcaccctgggcgacctggtgcgtgatgcccgggccggacggcgtgcccatggcgccgcaaccagcctccagggaaccttcgatttcgcggcggccggtgacgtcgagcccagcggcctgcccgagatgtcgcgcgctgagcggacgcaggcggagctcgcggtgctgggcatggacgtgagtcgccacatcgtggagttctaccaggagatgctgcagggcctcggttgggtgcctgccgcccagctgctagaccaccgcaaccacgaggaggtactggtcgcgggggtcaaggttgccacgcagacacccccggtgcgctcggggcgccgggtggtcttcctgagcctcgatgattcgaccggtcccgtcgatgccaccttcttcgaggacgcccagggcccctatgcgtccaccgtgttcagcaactggctgctcgtggtgcgtggtgagatccgacgcaccggcccccgtggcatctcgctgaacgccacgggagcctgggacatgcaggaactccatgcgttgtacagccgggtgcgtgatgcctcaggtcgtggggcggccctggccgccgtccgtgcccggctgggggagcatgcaaccagctgggcgccatcggccgtccatcggatgctccgccatcccagcggcttcctgcagtcgcccttcgccgataccgccgtggccggggaatcgctgatcaccgcctcgcgcaagttgtggcatgccagtccgggtagctcagggggctgaacctgccatggtgatcgggacggggcatgcctgagatgcccgatgtgatgcggggccgggtgatcatgcacgtcgacatggatgccttctatgcctcggtggaggcggcacgcaatccccggctgcgcacggtgccgttctgggtgggtggcgccgagcggggggtcgtgttgagcgcgaactaccttgcccgcacctacggggtgagtggtggcatggcttccacgcgggcccgccggttgtgccccgccggcgtggcggtgccacccgacttcgatcactacggggccgtctcggcgggggtcttcgccctgttcgaccagatcaccgaccgcgtcgaggccgcgagcatcgatgaggcctatctcgacatcaccgggtcgcaacgtcgactcggctctccccgcctgatcggcgagaacgtgcgggcccgggtggccgatgagcagcacatcacctgctcggtgggcatcgcccaggggcgggccctggccaagctggccagcaatcgcgtcaagcccgatggcctgctcgtggttgatcccggggaggtcgtggccctgttgcaccccctaccggtggagcagctgagcggggtcggccccgccaccgcgtccacattgcacaagctgggcctgtcgacggtggggcaggtggcgcataccccggtgtccaccctgcggcgtgcgctgggggctcgtgccgggcaatggctgtccgacctgtcctgggggcatgatgaatcgttggtggtggggcaggaccgggaacgcagcattggttcccagaccacctttgcccgtgacaccgatgaccccgagcaggtgggcaccgagctgttgcgcatggcggcacgcaccgcggggaggatgcgggccagtggcctgtgtggccgcacggtggtgctcgatgtgcgcttcgccgacttcaccacgatcacccgcagtgggacgctgcgtgatcccaccgatgtcaccgacgagatctatgcccgggcgaggaagctgttcgagtccctgggcctgcaacgcgcccgcatccgtcgcgtgggggttcgcgtcgagggcctggtgcccagcgaccaggcctatcggcagccggccctcgatgaacccgagcggggcatgcgccaggtggaattggcggccgatgacgtggtctaccgcttcggggcccatgcggcgcagcgcgcccgactcacccgcagaacgttgtccaatccagaaagcgggtcacccggcattacttctgtgggtgggaccgcctagactggacacatctgttactcctgatgaaggggctcttcacgatcgagggtgtaggtggggtctgaatcctccggcttcgagcagactcctcgcgatgtagttggtcaggttccggaagccgagggcggtgccgcgcaggtgttcgagccgcccgttgatggcctcggtggggccgttgctggtgccgggccggtcgaagaacgcgaggatgtccgcggcgcgctgcttcagggtgcggccgagcttgtggatctcgacgagcgccgcggggacgccggtggtgacggcatcgatcacggcttgcatcatctgcttgcccttgtccttgtctggttcgcggtaggcggcgatgacgcgctggtagatgccccaggtcgcttccacttcgacgtgttgctccgcggcgaacagcgcggtgagccgatcgcgttgcttgtcagtgaggaggccaccgccggtatgcagtgtgcggcgagccttgtagagcgggtccccggcgcggcctcgatgcccgagcgtggcctgctggacccgttgccggcaccggtccaggccatcgccggcgaggcggaccacgtggaagggatccatgaccgggaccgcggcggggagctcttcggcggcggcggtcttgaagccggtgaacccgtccatcgcgaccacctcgatctgcttgctccattccttcgggcggcccgcgagccagtccttgaacacggccttcgaacgaccctcgaccatgtccagcagccgagccggtcccgttttgttccgattcggggtgaggtcgatgatcaccgtgacgtacttgtcacccttcctcgtgtgccgccagacatgctcgtcgacgccgatcgtggtgaccccgtcgaaccgtgccgggtcatcgatcagctgccgctccccttcagcgaggaccgcactgttcgccgcggaccaggacacgcccaacccggcggcgacgcgggacaccgagaggtggtcgaggacgaggcccgccaacccccaggccagcccaccgcgagagatcttcgcccgctccggcgcggccttggacgtgtcctggcgccacacccgcccgcacccggagcacttgtaccgacgcacccggatcaacaacgtcgtcggccgatgcccgaacggttcatgcgcaagccgacgcgccaccgtgtcgcgagccacgccctcgcatccgcacttgcgacaccagcgatccggttcagcgacgcgacactcgatgaccgcacgatccggctccacgatctgcccgacggcctcaagaccgagctcatcgagtcggcagaacgtggtcagggagggcgcggtgaaggtagcgtggagcacgtcgaggtcttccggatgggcagtgcaggaacttccatcctcgtggagacctcgacccctaccagaccaccgacacgctcaggcgactacaccctcgatcgtgaagagccgatgaaggaggcgtgtgatgcccctgtcgaatgaagagcaaaagacgctcgaagaactcgaagcatcgctcctcgcggaggacccgcgcctggcccatgccatgggctcgtcccgcactcccaagcgcgcgcatggtcgccgtgccgggcttgccgggttgggcttcctgctgggtgtctgcctgctgttggttggcatgcagacggtctgggtgctgagtgtgctcggttttgtcgtcatgtttggctgcgcgattcttgcgttgggctcctggcgtcatatgtcccacgagccgaaggagaaggtgcgcccaccgaagagctcaccccatccgtccaacgatttcatgaccaagatggaaagccgctggcgtcgtcgcgaggacgatggacgactctgagtcctccagcaactgatcgataaccaggacccccggaccattggtccgggggtcctgtgcgtccgggcccactccaccgccgaccggcggcccggcattccgtggtggtgggtcatccggggtctcgtgagggctgtccagctgtccaagtgggggagagtggagtaatgtggagcgcagtggaggagccgattccgatcggacagtgaggggggtacccagatgttcctgggcacgtacacccccaagctcgacgagaagggtcgcttcttcctgccggccaagttccgcgatgaactcgccccgggtctggtcatcacgcgatcccaggatcgttgcctggccgtctacccgatggcgacattcgccgagatgacccagtcggtgagcactgctccggcgacgctcaagcaggttcgggatttccagcgcatgctggcagccggggccagcgatgagatcccggacaagcaagggcgagtcactgtcccgccggccctgcgttcctacgccgggctcgacaaggacatcgtcgttgtgggtgccatcaatcgggttgaggtgtggggctcgaccgcatggaaggaatactccaccgcccaggaggatgtcttcgcccagatgaacgaggagatcctctcgggggaagccgatcgctgactgcggtatgcggcttcagcccgagctgaaccccctggctccacttccccggtgccaggtggtgacatgactcgggttgggaccggatgccgcagtctttgcttagggtccggcaggcgggtgacgtggcgacgcgtggtcccctgcgggccatgtcaacgcaggggaggggacagccgtgacgcacgaagccactggccccgatccctcgacgatccacgtgcccgtcatggcggcccgcgtggtcgagctgttgagtccggccctggaccaccccggtgccgtctacgtcgacggcactctgggcatggccgggcacgccgaactcatgttgaccgcgaatccacaggcccgcctggtcggcatcgatcgtgatcacgatgccctcgacctggcctcgcgcaggttggcccccttcggcgctcgggtgcacctcgcccgggcgcgcttcgacgaattgggccgggtgcttgacgacgccggcatcgccaccatcgacgcggccctgttcgacctcgggttgtccagcctccagatcgaccgtgcagaccggggcttcgcctaccgggtggacgccccgctcgacatgcgcatggacacccgcagcgagctcactgcggcgcgcgtgctcaatgagtactcgcccggtgacctggtgcgtgtcctgcgcgactacggcgaggagaagcaggccacgcgcatcgtgcgggccatcgtcgccgaacgtgaacgggagccattcaccgattcggcacgcctggtcgacctgatcctgcgggcaatccccgccgcggtgcgcacgaagacgaagggaaaccccgccaagcggaccttccaggcgctgcgcatcgaggtcaacggcgagctggaggcattgtccacagttcttcctgtcatgctgggccgcatgggcccagcagccagggcggcggtactcgcgtaccactcgctggaggatcgcatcgtcaagcaggtgttcactgccgccacgagcgattcggcaccggcgggactgcccgtcgtccccgacgagatggcggcccggttcgcgccgctcacccggggcgccgagaagcccgatgccgccgagatcgcggaaaacccccgttccgcgtcggcccgcctgcgcgcgatcgaacggatccgtcccgatgtcgccccgtccgcaggcagccggcacggtcacagaagaggtggtcgacggtgaagaagctcctcggcgcggtgcgcacgagcatcaatgcggcgcgtgagaaggccggcgcggccacctcgggacgccgccgcatctccggaatccccttcatcctcgccctggtgatgctgctgggcgtcggcatggtgggggtgctgctgttcaatacacgcatccaggaccagcaacgccagctcgacgagctgcaggcatcggcgcagcggcttgattaccacgaggcggcactggagcagagcgtcgaccagttgggcaccaccgacaccttgggggccaaggcggcgaacctgggcatggtgccgaacccgaaccccctggtgatccagatgccccagggctcggtgaacggtaagccgcaggccgccgatggcaccgcgatgcccggcattgcagtgccctcgaccatcagcagcgcgacgccgacctatcggcccgccagcccgacgcccaccccgacgcccggtgctgccaccggcacgccgaccgcctcgccaacggagggacgatgatggccgggcagcccaacaagccatcacggggcaactcctcgggcaggaacccctcgcgcagcaatccttccgcaggtaccggttcccggcgccccggtggcgcacgccggccctccggtggcccgcgccccggttccgggcagcggggacgacagcgctcgtcgggcgcctccacgcgcgaatcgttgaaccaggccctgtcgacgatgcgcctgaagatcggcgactccaccaagcgcatccggatcttcttcgtcgtgatggccgtggcgatcaccctgctcgcgggacgggccctggtggtgcagggcatcaattcccaggcggtggccgccgccgctgccgccagcatgaaggtctcgctcgaccaggaccgcgtgctcaagccggtgcgcggcgccttcctggaccgcaacggcgaggtcctggccaccaccctgccggcggtgaaggtgatcgccgacccctacgccatctcgctcaacggctacaacgccgactcgttgtccgcgaacgccaggagcaccctggcgcagaacacccccaagcagatcgccgacgtgctggtggcccacctgggtggcactgccgccgactacctgccccaactcagccgggtcaccggcgccaacgggcagccgaaccgttacgaggtgatggcctcgaaggtccccgccgacgtctaccagcagatcctggccgacatggccaagcagaccgatgccctggaggacaccggcctcaatggcatcaccaaggaggacgatccacaacggatctatccctccggcacgctcgcctccaatgtgctgggcttcgtgaactccgagggctcgggagctgcggggttggagtcctatgcgaacggcaacctggccggcagcgagggcttcgagcagtaccagaccagtcagtacgggcgcatccccctgggcaactccaccgtcaaggaagcgaccaacggcaccagctaccagctgaccctcgactccgagctgcagtaccaggcccagcagctcctcaactcccaggttgccaagtggcaggcggtcacgggcaccaccatcgccatgaacgtgaagacgggcgaggtgctggccatggccaccacgcccagcttcgattccaacaagcccggtgacgtcaccgatgccggccccctgggcaatcgggccgtgagcgacgcctacgagcccggctcggtgcagaaggtgttcacgatggcggccctgctggacgcggggctcatctcacccgacacgaaggtgcaggttcccgccggggtgcaatcgggcggcagcgtgatccgcgatgccgacctgcactccgacaccaagtacatgaccgcccggggggtcatctacaactcgtccaatgtgggtgccaccctgctgtcgcggctcatggacaaggacaccttccaccagtacatggccgatttcggccttggttcgaccaccggcatcgaacagcccggtgagtcggccgggtacctgcccggtgccgacatggaggactacacgaaggaccagatggccttcggacagggcgtctcggtcaccgccatccagatggcggccgggctgtccgcggtgaccaatggtggcatctaccacgagcccaccctcatcaagagcgccaccgatgcgtccggcaagaacgtcgagcttcccgcgcggtccagccgtcgggtgatctccgaggacgccagtgcccagctgcgcaacatgatggaggcggtggttgccgccggtccgaacgcggccaataccatgatcaccggctacacgatgggtgccaagtcgggcaccgcccagacaatcaaccccaataccggtgcctatgactctgacctgtacatgtcgtcctatgtctcggtcgccccactggatgacccccagatcctggtgtatacggtgatgcaggtgcacggacagtacggcggcaccgttgccatgcccacctcgcgcgacctgatgaagatcgccctgccccgctatggtgttctgcctgaggctgatgtacccaaggacaccgatcccctcacctattcaccgtgatgacgacaaatcagaaccccacgaaccgcccgcgcgcagcacggccggcacatgtgcaacccatctcactggccggcgctgcggacggactgtcggtccgccttccggccggcgccgatcacctgcagatcgtcgacgtctacctcgattcacgctccgtgctgccgggcagcctgtatgtcggcctgccgggcacccgcacgcatggcgccaacttcgccgcgcaggcggcagcgctcggggcagtggccctgctgaccgacgccgagggcgcggaactggccgccgacgccggactgccgatcgtggtggccgagcagccccgggtggcgatggcacacatggccgcccgcgtgttcggcgaccccacccgcgacctgttgatgatcgggatcaccggcaccaatggcaagaccacctgtgccttcctgatcgaaggggcattgatcgccgccggccaccgcgtcggcaccatcggcacgatcggtttccggctcgagggcgagccactgcccagctcacgcagcaccatcacgacgcccgagtcctgcgacctgcaggccctgttcgccgtgatgcgcgagggtggcgccgatgccatcgtgatggaggtcagctcgcacgcgctggccctggaccgtgtcgagggcgtgcacttcgacgtggccgccttcaccaacctgggacgcgaccacctcgacttccacaagacccaggaggcctatttcgaggccaaggccaagctgttccgccccaccatgacaagccgcgcagtcatcaacggcgacgacccgtggggcaggatcctggtggagcgtgccgacgcggccggtgccccgcacgtggtgaccacgggatttgatccggagcgcgactaccgggtgctcgactcgacgccgaccatcgagggcggggaacacatcgaactcgctacgcccggtgaggcgatggccttcgatatcgccctgcccggccagtacaacgtcgcgaacgccgccaccacgattgccgtgctcgcccaggctggcgtcaacctggaccgggctgtgcccggcctggagaaggcgctggttccaggacgcatgcagcgcgttgacctggggccggacagccccagggtctatgtggatttcgcccacaccccgcaggccgtcgagtctgcgctgtcggcccttcccggacgcacgctcgtcgtcctgggggccggtggcgatcgcgacgaggccaagcgcggaccgatgggcgtggccgccgcccgccacgccgacgtggtggtggtcaccgatgacaacccgcgcaccgaggaccctgccacgatccgggccgaggtgctggccggggcccggcaggtgcccgacaccgaggtgatcgacggactcgaccgcaggcatgccatcggcctggcgctggggatggcacacgccggcgacgccgtcgcgatcctcggcaagggccatgagaccacccaggagatcaacggggtgctgcaccccttcaatgacgtcaccgtcgtgcagcaggcctggacgtccgaccatccggatgctgcgcccgcagaccacgaaaaaccaaggacaaggggaatctgacgtgcgtgtcactactaccggcgatctggccgagctggtctcggcccatggcacgccctgtcgattgcagggcagtgccgccgtgccggtgggaccccaggtggttattgacacgcatcaggtgacgcccggtgcgctgttcgtcggcctgcccggcgagcatgtcgacggcgccgacctggccccgcaggccgccggtgccggagcagctgcggcgctggtcggccacgacgtcacggccgggcttccccgcctgatcgtcgaggatgccggcagaggactgtccgccctggccaccggcgtggtggccaccgaactggcgcgtggactgatcaccttcgcgatcaccgggtccagcggcaagacgtccaccaaggacctcctggcccaggtgctggaggccaccggccccacggtcagcccggccggcaaccacaacaacgagatcggcgtgccgctgtcggcgtgcggggtggacgccaccacgcgctacctggtcagcgagatgggttcgcggggcaagggcgatgtcgccacgttgtgccgcatcgtgccgcccaggatctccaccgtgctcaatgtcgggaccgcccatctgggcgaattcggcagtcaggacgccatcgccgaggcgaagggcgagatcgtcgaggcccttcccgccgatggctgggccgtgctgaacgctgacgacccacgggtcgccgcgatggcaccacgcaccaatgcccatatcgcccgttggaccacaaccggtgccgcacgggcctccgacgccgaactgttcgtcagcgccgaccacatcaccaccgatgccctgcagcggggctccttccagctgcgggtcacccgcggcggcgcgaccagtacgcacccggtgcggctgcgcctgatcggtgcccatcaggtgctcaacgctacggctgcggccacgatggcgctggcggccgggctcgatcccgccgccgtggccgcatcactcagcacggcgaccacccgctctccgctgcgcatggaactccatgagctgcgcggcggcatcgccctgatcaatgattcctacaacgccaacccggattccatggctgcggcactgcatgcggtggctgccatgggcgcggcgcggcacgacgaatatccccgggcccgcaccatcgcgatcttgggggagatgggcgagctgggcacccagtccgcgcggttgcacgcccgggtggcccggctggccgccgatctggggatcgacatcgtcattgccctgggcgaccatgccgggacgatggcgcaagcggcccgtgagggcggcgcacaggcgcgtgcggcacgcaaggaggaggtggctgacagcctcgagctcgtcccgggcgatattgtgctggtgaaagccagccgctcgatggcccttgaggacatcactgcgcagctgctttcgcttgatgccgctacaacccatcacgcggccggtaaggaggaactcccgcgatgatcacgatcctcggagcgggagttctggcgttactgataacgctgatcggcaccaagttcttcattgtcttcctggtgcaccgcggctatgggcaattcatccgcgacgacggacccaccagtcaccgcaagaagcgtggcacccccacgatggggggcctggtggtcatcgctgcggccgtgctcgcctatttcctgtcgcacctgatcaccaatacccgcatcaccgtgtcgggggtgctcgtactcggggtgctcgtcgccaccggtttcctgggcttcctggacgactggaggaagatctccaagcaacggtccctggggctgaagccccgcggcaagttgatcggccagctctccatcggcgttaccttcggggtgctgtccctgatcttccccgccgccgcgggcgatgtcggttcgcacccggccagccagtacgtctccttcctgcatgacatcgactggctccggctgcccgtggtgctggccatcctgtggatgaccttcctaatcacctccgcgtccaatgcggtcaacctcaccgatggcctcgacgggcttgccaccggggcctccaccatggtcttcggtgccttcgcgctgatcgcgatcttcgagtcgaaccagtggtgcctgaccggcagccacctgccgcgttgctacgacgtgcgcgatccctccgacctggcggtggtggcgattgcgctggcggcggcctgtttcggcttcctgtggtggaatgcgaaacccgccaagatcttcctgggtgacacgggttcgctcgccctgggtgcggcaatggccgggttggcgatcttcacgcgcaccgaactgttgctgatcgtgctcggcctgctgttcgtcatcgagacgctctcggtgatgatccaggtgggctatttcaagctgtcgcatggcaagcgcgtgttcaagatggcaccgctgcaccatcacttcgagctcgtcgggtgggacgagccgaccgtcgtggtgcgtttctggatcatttgcggggtgtccgtcgccacggcactcggtctgttctatggcggttgggtgtggggatggtgacttcggtcaaggaatggatcgctggggccgatcggacgtcgccctggccgcaggcacatgtggtggtcgccggcctgggcacgtcgggtttcgccgctgccgacgcattgctcgagttgggcgcacgcgtcacggtgatcgacgacgtggatgccgaggccatgcacgaccatgccaggatcctcgagaccctcggtgccacgctgcggctcgggccgggttccagccagcacctgccgtccgacgccgatgtggtggtcacctcaccgggctggcgtcccgacgaatcgctcctggcggccgcggcctcgcgggacctggccatctggggcgaacccgaactggcgtggcgcctcatgcatcccgaccgcgtgattccctggatcggaatcaccggcacgaatggcaagacgacgaccacccagatggtggactcgatcctgcgagccgccggccacaagtcggccgccgtgggcaacatcggacggcccatcatcgaggccatcaacgacccggcggggtacgacgtgctggcggtggagctgtcgagcttccagctgcactggtcggattccctgagcctgtactcggcggccgcattgaacctgcatgccgaccacctggagtggtactcctatgccggtgacaccgacgcggccatggtggcctacggggccgacaaggcgaagatcttccacaatgtgcgcacggcatgcgtctacaacgtcgccgaacccgcgacccggacgatggtcgaggaggcggaggtgatcgagggcgcccgcgccatcggcttcaccctgggcattcccaaggtcgccgaggtgggcgtggtggacgacatgctcgtcgaccgggccttcgtacaggaacgacagacctcggccatgccggtcgcagcgctgtccgatgtgcatcccttcgcgccccacaacgtggagaatgcgctggccgcagcggccctgacccgcagcttcggggttcccccgcgggccgtcgcacagggccttcgtgacctgcacctgggtggacaccgcattgagacggtcgcccagtccgatggcatcacctgggtggatgattcgaaggccaccaaccccaatgcggcgaattcctcgatgcgcgcctacgagcacatcgtgtggatcgccggtggacagaccaagggcaccagcttcgacgaactgctcacccgccatgccaagcgcctgcgcggggtggtgctgttgggcgtcgatcggcaggtcattgccgatgctttgcggcgacacgccccgcgggtgccggtggtcgtgctggacgggaagcagactggggtgatggatcaggcggtgcaggaggcgtcccgcatggcacgtcccggcgataccgtcctgctcgcgccgggagcggcgagcaaggacatgtggaccggttacgcggcgcgcggtgacgacttcgccagggccgtgaagagtctgctggcatcgggtgacgcctagtccgtccgggccagacgccctgatctgcgcgcagtgccgacggcgtggcacccgggagtggcgcaccagcgcccggggcgcagcccatgacgtcccgacgccggggacgcatggacgcaggacggatggacacaggcacgtggacacaggcactggcaacaggtacatggggcacaggcagggggagggttgatgtcgaccgcgaccgatgatcgcgcaacgcgggacccggacacgtccgggggcggggcatcgtccctgtcgcgtgccttcgcgcacccgctggccgactactacctgttgctcacctgctcgggcctgctgctcgcgctgggtgtgatcatggtgctgagttcgtcgtcggcctatgccgcggcgaacatgaatgattcctactacttcttcacccgccaggtcgccttcctgatcgccggggtcctcgcctgcggttggctggcgcggcgcagtgaggacttcttcaagttgttcggctgggtggtgctcatcggatccatggctgcccagctcctggtgctcctcacaccactcggaacgcctccctcgggcatcagctccaagggcaatcgcaactggctctacctcggtccgttgagcatgcagccggccgagttcgcaaagctcgggctcatcgtgtgggccgccgcgatcctcgccacccggggcaccaccatccgcgagccgaagcgactcttcgtgccctacctggtgggcttcggcgtcgtgctcggcatggtcctggccgggggtgacctgggcaccgccgtgatcatcgttgccatcatgatcgcgatgctgtggttcgtcggcgcaccgggatggaccctcgccggcatcatcggcgtggccggcctgggtgcactgggcatggtcgtcacgagcgcgaaccggatggcccgggtcaaggccttcctgtcgggctccggcgcatcctcggagcagcccctccactcgatctacgccctggccaccggtggctggtggggcgtggggctgggacgctcccgcatgaagtggggcggcctgtacgacggggtgctcaacgactatgtctttgccgtgctcggtgaggagatggggctcatcggcaccctgacgctcatcgtgctgttcctggtcttcggcatcgcgggggtgcgcattgcactgcgcagcaagggcaccttctggcgccttgccgcagccggcatcaccgcatggttcctggtgcaggcctgtgcgaacatcgcggtggccatgaagctcctgccggtgatgggcgtgcccctgccgttcatcagctacggcggctcatccctgctggcgaacctcatgggtgtgggcgtcctgctcgccgccgccaggaacgagccggatgcgaaggtcgcgctgaatacccaacgcccgccggctgcagagccggtacgggtgacatcggtggtcgacaggaaggggcggtgatggtcaacgtcgtgttggccggcggcggaacggcggggcacacctcgccgttgatcgccacggcggagcaattggccatggccgacccgggtggctccctggtctgcgtcggcaccgccaagggcctggaaacccgcgtcatccccgaggccggactgaggctggaactcattccgccggttcccctgccccgtcatgtgaatgccgacctgttcaaggtgcccacgaggctggtgggtgctgtccgcgcggcctcgcgcatcctgcgcacagcccacgccgatgtcgtgatcggcttcgggggctatgtgtcgatgccggtctacctggcggcgcgccggatgcacgtgccggtggtggtgcacgagcagaatgccctgcccggactggccaatcgcatcgccgcacgcttcgcggcggccgtgctcaccaccttccccgacacccggttgccccatgcccagcgcgtcggcctgccggtgcgcgatgccatcgccgagctggccgagcagggtcgctccgcgcggcggggcccggcccgggacagcttcgggctgcgccgtgacctgccggtgctgttggtcagcggcggctcctcgggggcccgatccatcaaccgcgcaaccgtggcggcccgtgaccaactcctggccgccggcgtccaggtgctgcacgtgctgggcctgaagaacttccatgacgacaagccggtgaccgatcagcagaccggagccggctaccacccggtggcctatgtcgacgacatggcctcggcctatgcagccgccgatctcatgctggcccgcagcggtgccggcaccgtcgtcgagacggccgtggtgggcctgccggcaatcatggtgcccctgccgatcggcaatggtgagcaggcccgcaatgccgcccccctggtgggggccgacgccgggatcatcgtgcctgacgacgagctgggcccgcagcgcctgatcagggaggtggtaccgctcatcaacgacgcggaccgcctgtccaccatgggggaggccgcgcagcgcgtcatgcctgcgggcgccgcccagcgagtggcgaacgtggtgctgcaggaggcctcacgatgagtttgcgcgaaccgatccggctggtgcgtccctccgagctcggggcggtgcacttcatcgccatgggcggctcgggcatgagcgggctggcattggcctaccacgagctgggcgtgccggtcagtggctgcgaccaggttgactccaagaccctcgagcaactgcacgacgatggcatcaccatctgggtggggcacgatcccgcccagctcaaggacgtcgacaccgtggtgatctccagcgcgatccaccccgacaacgtcgagctcgtcgcggcccgcgaacggggccttcgcgtctggcaccgcagcgccgccctggccgcgctgatgctcgaccacgaggcggtctcggtggccggcacccatggcaagaccaccaccacggccatgatcgccacgatggccaccaccgccggcgccgaccccagctatgtggtcggttccccgctggcgtcgacgggggagagcgccaggatcgggaagggcacgcccttcatcgtcgaggccgacgaatccgacggctcattcctgcagtaccccacccggatcgcggtgatcaccaatgtggaggccgatcatctcgataactggggcagcgccgagcactatgcgcgcgggttcgagcgcttcgcgaccggacccaccgtccgcgacgtcgtgatcgatgcggacgatgccggggcccgggagctcaccgggaaactgcggcgccttgcgtcggggcctacggtcaccacctacggggaggccgacgacgccgacgcacgtctgtccgacatcgagttctccggcatgcactcctcggccaccctgcatttccagggccatgagtacgccttgcgcctgtcggtgccggggcgccacaacctgtggaatgcggcagccgccttcgtgaccggacgactcctggggctggccgcagacgacctgctgcggggtgcgcaggcatttgctggcaccctgcgccgcttccagcccctgggctcggccaccctgcccgacgggcaggtgcacgtcttcgacgactatgcccatcatccgaccgagatccgcgcggccctgaacgcaggacgccgggtggctggcgaccaccgtctggtggcctgcttccagccgcacctgtacagccgcacccgggaattcgccaccgagttcggccgggccctggccctggccgacctggtggtagtcaccgacatctatggtgcccgcgaggaaccggtgccgggggtgagcggcaagctggtggccgacgccgccgtcgaagcgggcgcggacacctactacgtgccgaacaaggccgagctgccggtcgaactggctgcgctggtgcgcggcggtgacttcgtcctcaccctgggtgccggtgatgtgacattggtgggcccgatgctgctacggctgctccgcaagcgccattcccgggagaaccggtgagcgccgacccggtcccgccgcccgcagccatcgatcccgcactccaggtgcgccgccaggcgcggttgcgcaggcgtcggcggcgactgggctggaccgccgcggcggtcggcctgctgctggtgatcggatgggtgttctacctctcccccttcctcaccgtctcccgggtcaacgtcgagggtgcccacgtggccaccgatgaccaggtgcgccaggccgccggcatcgccaaggggagttcgctggccggactcaatgcccacgcgatcgaacagcgcgtcgcaaagctgccggtgatggcctcctgccacctgacacgttcctggcccagtgcggtgaccctgcaggtcaccgaacgcaagctcgtctaccaggcgcaggacgccggcagcttccagtggaccgatgagaccggagcggtcttcaatatgaccaaggatgcccaacaggccccgatcgcccacctgccgggcaatgccagccagcaattgcgcgccgatgtggccacggcacttgactccctcaccccccaggtcaagtcgcgggtgcaggcggtttccgccagttccagtgacaacatcctgttgcagttggataatgaccaggcggtgttctggggcagtgcggaccaatccggcgacaaggcggccctgctgcccgtattgctggggcagggcggcgcaaccttcgacatctcatcggtgtcgcatcccgcggtgaaataggtggatcggctgtgcagatgatgcgaaagccccaatgtctcgacccatggttgaggctctcaggcgggtggcagggtcccagtggacacccccgcccggccttccatagcctgacactgcgcagcgggccgcccgtgtcggtggaacgaagagcgttcatgagcatttcgacacggtcgttgattcggcacgatcagcaagaaagaggcggactctcgtgacagcagcgtcgcaaaagtacctggcggtcatcaaagtggtgggcgttggcggcggtggcgtcaatgcggtgaaccgcatgatcgaagaaggcctcaagggcgttgaattcgtggcggtgaataccgacgcgcaggcattgttgctcagcgacgccgatgtgaagctcgatatcggccgggagctcacccgaggactcggcgccggcgccgatccggacaagggccgccaggcggccgaggaccacgccgacgagatcgaggccaccctcaaggaggccgacatggtcttcgtgacggctggcgagggcggtggcaccggcaccggtggcgcgcccgtggtggccaagctggcccgttccctgggggccctgaccataggcgtcgtgacgcgccccttcggcttcgagggcaagcgtcgggccaagcaggcggaggagggcatccagcgcctgcgcgaagaggtcgacaccctgatcgtcatccccaacgacaagctgctggagatgaccgaccgccaggtggccatcctggacgccttcaagcaggccgaccaggtgctgatgcagggcgtctcgggtatcaccgacctgatcaccactccggggctgatcaaccttgacttcgccgacgtgaaatcggtcatgagcgacgccggctcggccctcatgggcattggctcggcgcgcggcgaggaccgtgcccgcactgccgccgagcaggccatcaacagcccgctgctggaggcgaccatagacggtgccaggggagtcctgctgtcgatcgccggtggttccgaccttggcctgttcgaggtcagcgaggcggcgaacctcatcgaggaggctgccgccgacgacgccaacatcatcttcggcaccgtgatcgacgacgccctgggcgatgaggtgcgcgtgaccgtgatcgcggccggctttgacgccaaccatggtccccaggacggcaaggtgcgcaagcccgccgccagtccgaacccgacggccaccccgcgccagaacccgggagccggcgaggcacccgcccacgcacaggcccccgcggcgcaaccggagaccacggtgcgcacgcccctggttccccagggccatgcccccgaggccggccccgagttcgatgagccgacccgacgcaccaatccgccggcacagcccgctccccagcgcacgcagttgccgcccgacgatgacgacgatctcgacgttcctgatttcatgaagtagaactggtccatgttcagttacctgcgtgagccgacgccgcgcggggtcggcgatgtgggcgtggccttcaccgaccggcgtggcggcgtgtccgtgggcggattcaggtccctcaacttcgggcgcaccgacgtcgacgagctcgcggtattgcgcaccaatatgtccctgctgcgcgcccggctggggatcgcgcccctgcagacggtccatcaggtgcacggcaccatgattcgccacatcgatcgggtcgatgacctccagggccctgagggctggctgggtgacctggtccccggtggtgctcccgtgccggtcgccgactccatcgtgtgcacgctgcccgacgtgcccctggccattcgggtggccgactgcgttcccgtggtgctggccgatgtgcacgccggggtgatcggtgcggcccacgccgggcgcgtcggcctgctgacccgggtgctgcaggccaccgtcgacgccatggcctcccggggtgccacgtcgctggaggcatgggtgggtccccacatctgtgggcgctgttacgaggtgcccgacgacatggccgcccaggcctaccgggcgttgcccgccctgcgggcgcgcagtcgctggcacacggcctcgctcgacctcggcgcaggcacccaggcggtgctcgaggcggccggggtgcgggtgcaccgtgtcgatccctgcaccctggagcaccccgacaccctgttcagccaccgggggagcaggggccgcgccggacgccagataggcctcatctggcgcgacgggagcacgtcgtgagccgcccgacggccgtcgcgtcgtggcgtgcgcggggtcatcgaattcagggcgccacgccgcaatgcgccgtgtggcgcgctggccaaccgggtaacctcttgggtgccgcacacctgatggggcgcgacgcaaggagaaggggctcttcatgccggaactagtcaaaaaggccgcagtatggctgggtcttgtgaccgacgaccgctacgacgaggaagcccccgaggaggagtactccgaatccgtgtacatcgaggacggccaggccggtgctgagcagccccccgtccgcgagttggccgccaacggtgccggcgtcgagacgggtgccgcgaccaccgatgtggcaacgaaggaccatccccacgcccaggtgacccagactgcggacctggcccgcatcatcagcgttcgaccccgcacgtacaacgaggcccgcaccatcggggaggctttccgcgacggcacgccggtgatcatgaacctcaccgacatggacgactccgacgccaagcggctggtcgacttcgccgccgggctgatcttcggattgcacggctccatcgagcgcgtcacctcgaaggtcttcctgctgagcccccgcaacgtcaatgtcaccgccgaggacaagcagcgcctggccacctcgagcttcttcaaccagagctgacccgtgctgatcgcctacaccgcgcgcgttttgctgatcctgctcaatgtgtaccttgggctgctgttcgtgcgagccatcatgtcgtgggttcccctgttcgcgccgaactggcgcccccggggaccgatcctggtgatcttcgagatcatctacacactgaccgatccgcccctgaaattcgtgagtcgcgtcatccggccggtgcacatcggctcggtcgggttggacatgggattcctcgtggtcgtgctggccatcatcgtggcccaacgagtgctcgtcatcttcgcctgagcccccgttcgaccctcaaccaagggtcgagctttgccgggtcggcgcgacctggtgggttccggaagggtagcctctttcggtgtccccgcagttgcgggtaagagaatcacagcagcgaggtttggagcgcacaatgacgctgtcccttgatgaggtccgcagtattcgtttcccgttggcccgtaagcccaatgaggatggctaccgtgccagttcggttgacaagttcatggatgaccttgaggtcagctatgcgcagctgaccgaggaactggacaagctcaagcagggcggcgctgcaaccggcagcgatgacgccaaggtctctgagctcaccagccagatcgaggacctcaccgggagcaacaagaagctcacctctgatgtggagcgcctcaccggcgagaacgagcagttgcggggccagctcaacgagctgcgcacctccggtggtcgtgattcggccgccaaccagcagctcaccaccgagaacgagcatctgcgcaatgagctcgagggcctgcgcagccagctgtccgaggcccagtcgcgggcggcgcagaacgcagcggccgccaccgcatcgcagccgatcgtgtcggccgatggcgagcagcacatcaccgtgaccgcttccgccgaggcaggcgcttgggcagcccgactgctcgagatggccacccagcaggccgatcagctggtctcggaggcccacgaacaggccgacagcctggtggcccgcagcaatgccgatgccgagcgcacgcgctccgaggccaagaccaaggcggacgccatggtcgaggaagccacccagaaggccgcgcggctcgactacgaatcgcgtaacaacgcggagcgcatcaccggcgacgcacagcgtcgcgccgacaacctggattccgaggtcgccgcaaagcgcacggagttgttccaggcgctggaggttcagcgcgaccagctcgctgaccgcatcaaggccctgcgcggcttcgagtccgactaccgcaccaccatcaagaacgagctggagagctcgctgagcaggttctccaagctgagcctgtcgccggagtccgaggacgatagcccgcgcctgcacgcactgctggaagaccgtaagtccgagtaggcatctgccgggcttgacggcgggtgtagcctctgccatcagttgtaaatccacgaccaagagagttggaactgatggcagtgaagggcaagacagcgtccgtaaccacagtcgacctgccagtcctcgagggtgagaagccgtggactgcggaggagatcgctgaggtccgcgaagagctggtctcggaaatcgcacgcatgcgcaaggccgttgagacctcggatgaggaattggccacgctgatggacgagggcatcgaggccaccgggaaggatcccggcgacgtcggatcgtccaacttcgagcgcgaccaggaaatgagcctcaacgcgaatacgcgtgagttgttggagcagaacgagtcggcgttgcgtcgcctcgatgagggtcagttcgggttctgtgaaaactgcggaaatccgattggcaaggcacgcctggaggcgttcccgaaggccaccatgtgcgtgaagtgcaagacgcgcctggaacggcgctgagtcggcgcactgcagacgtggccacactcggacagttgacgacaagaccgctgacgatgatgcgcaccgccatggtggcggtggcactcgtcggctatgccctcgacaggtggaccaagcagctggccctcacccacctcgcgaccgcggatggtccgagtttcctcaatggctgggtcagcctgcagctggtgctcaatcccggtgcggccttctccatgggcagttcggtgacgatcgtgttctccgtgttgtccatcgccgccctcgtggccgtcatcgtctggggatggccgcgcgcccacggatggctcacgagcttgtgcgcaggcatggtcgcctgcggcatcgccggcaacctcaccgaccgcctggtgcgtccgccaggacccctgcgcggccacgtggtcgacttcatctcggtacagcacttcgccgtgttcaacgtggccgacgtgttcatcacctgctcggtggtgctgttcgccatctacctgctgcgcgctgatcatgcgggtcccggcccggactccgggcgcccggagcccgtcgcggccaccgaccaccggcgggaagaccatcaggaaggtgggtcatcgtgagcgttctgttcgtcccggacggtctggagggccagcgcatcgatgcggccgcggcccggatgaccggcctgtcgcgttcacgtgtcgtcgacctcatcggtgagggaaaggtgctgctggacggctccaccgtcgtcaaggcctccgagcgggtgcacgggggacagaccattgacatcgacctgtcggaacccacccgggtcgcgcgggtcacgccggccgtcgtggagggcatgcgcatcgtgcacgacgatgccgacatcgtggtggtcgacaagcccgcgggcgtcgccgcccatccgtcggtcggatgggacgggcccgatgtggtcagtggactggccggtgccggcttccggatctccacctccggggcagcggaacggcagggcatcgtgcaccgcctggacgtgggtacctcggggctgatggtcgtggcgaagtcggagcgggcctacaccctgctcaagcgcgccttccgcgaccgcaccgtcgacaagtactacttggccctggtgcagggccacctggacgccagcgagggcaccatcgatgcgcccatcgggcgccatccgggctcggaatggaagttcgcggtcaccgccgacgggcgtcccagcgtcacccattacgagacggtcgagatgatgcgcggggcctcgctgctgcgggtgcacctcgagaccggacgcacccaccagatccgggtgcatttcgccgcactgcaccatccctgcgtcggggatcccctctacggtgccgatcccgtgctcgccgcccagctggggctcgagcgtcagtggctgcacgccgcggtcctgggcttcgtgcatccgggcaacggcgagcacgtcgaataccattccgatccgcccgcagatctgcaggatgcgctggaggccctccgcgacgagtgagtcgcggttccgaaggccgggtgacgagtgagtcgcggtcccgaaggccgggtgacgagtgagctgcggtcccgaaggccgggtgacgagtgagctgcggccggggaagcagcgcaacggatgtgccgagcgaccacgggtccgggcctcggccggccggccgccgggcttgcctccccgtcgtggcgcgttcgccctcggcgatgaacgtcctgtgaacgttctcccatccggggggccggagcagggccgtcagcaccgtcccgggtagggtttgggtgtgcgtagagccaagattgtgtgcacgctcgggccggcaacgtcgacccaggagcgtatggaagagatgattcacgcgggtttggatgtggcccggttcaatatgagccatggggaccattccgaacacctgcgtcgccttgaggagacgcgtgccgcggccgaggcggtcggtaagaccgtgggcctgctggcagaccttcagggccccaagatcaggttgggtgtcttcgccgacgggaaggccgagctcgcgctcggccaggagttcatcatcaccaccgatgacgtccccggcgacgcccaccgcgcgtcaaccacctacaagggactgcccgccgacgtgaaggccggcgaccgcatcctcatcgacgatggcaacatccagctggaggccaccggcgtcaccgacaccgatgtgatcaccaaggtcaccgttgccggccccgtgagcaaccacaagggcatcaacctgcccggcgttgccgtcaacgtgcccgcgctgtccgagaaggacgagaacgacctgcgctgggccttgcgcaacgacttcgacatgatcgcgctgtccttcgtgcgccatgccgccgacatcgaccgcgtccacgagatcatggacgaggaggacatgcacctgccggtgatcgccaagctcgagaagccgcaggccatcgagaacctcgacgagatcatcgacgcctttgacggcttcatggttgcccgcggcgacctgggtgtcgagatgcccctcgagcaggtgccgctggtgcagaagaccatcatccgcaaggcccgcaagtgggccaagccggtgatcgtggccacccagatgctggattcgatgatcagcaatccgcgcccgacccgcgccgaggcctccgatgtggccaatgccgtgctcgacggtgccgatgccgtgatgctgtccggcgagacctcggtgggtgccttcccggtgaccaccgtggagacgatggccaatatcgtctccaccaccgagggcgagggcctcaccgacatctcgaagatcaagtgggatccccacaccaccggcggcgtcattgccatggctgccgccacctcgggtgtgcagctgggagccaagttcctggtggccttcacccagtcgggtgataccgcacgccgcatgtcgcggctgcgcaatgacattccgctgctggtcttcacccccgaggcgaagaccgcccagtggctgacgctgtgttggggcgcccaggtgttccacacccccagttactccagcaacgaggaaatggtcaccgccgtcaaccgcaccctgcaggacctcggtctggcggcacccgacgacgtcgtggtgatcatcttcggttccccgatcggcatggtcggcaagaccaacaccatgcgcatccaccggctgaagccgatcgactgggtcgagaaggtcaagctgccgagctatatgcgcggcgaggatggtcccgtcgatggcaccgtggtggccaacgacaggcgctgacaagggccctcgcaaatgacttctggcggtgtcgtggcttcggccatggcgccgccagtggcatgtgggcggtggcatgtgggcaatgacgtgtaggcagtgtcatgtggggcagggcgctggcagcagcccgcagcgtcgtgggacgcaatggatctgccccgcagggccggtgtcatgcaggactggtgccgtgcaggaccggtgctgtgcggtcaatgagggatgaagggtgcccgagaggggagtcgaacccctatgccctttcggacagcgcattttgagtgcgccgcgtctgccattccgccactcgggcgagcggaactattctggcacaatcgtgcgtccgggacgacttgccggcggcggcgcggatgctcgccccactgtccggggccgcgggtttcccgggtgcggccgaccgcggggcccggcgcggtggcggggccggtggtccaatccggggtttgcaggcgatagactcgttcaggcgtgtggtcggtggcccacgatagaggtagacaggattaggcacatggtgacgaagaagtccgacaagcagcccgcccagaagcggactcgtgtgctcgtcgccgaggacgaggcgctgatcaggctcgacctggtcgaactgctgaccgatgagggctatgacgtggtgggtgaggccggcgacggcgcgaccgccgtcaagctgaccaaggaacttgagcccgacgtggtcgtgctcgacgtgaagatgcccgtcatggacggcatcaccgccgccgagcagattgccggggaacgcctggccgccgtggtgatgctcaccgccttcagccagcgcgatctggtggagaaggcccgcgaggccggcgcgatggcctatgtgatcaagcccttcgattcctccgatgtggtgccggccatcgagatcgcccaggcacggttctccgagatcgtggcactcgacgaggaggtcggcacgctggaggaccgccttgcctcgcgcaaggccgtcgaccaggccaagggcatcctgcaggacaccctgggcatgagcgagcccgaggccttccgctggatccagaagacggcgatggacctgcgcaagtcgatgcgcgaggtcgccgagggcgtcgtgcagcacgagaaggccgacaccacctccgagtgagggccgcgcgccggggcactggcgcgagcacgcatcggcccacgcacaggtccgtggagcgggcgggtggatgcgcgatgtcaccgtcacgccctaggctcggcacgtgactgagactgcgcgactgctggtgatcgacggccattcgatggccttccgggcgttctatgcgttgcccgtggagaacttctccacctccaccgggcagtacacgaacgccgtctacggcttcacgtcgatgctcatcaacctgctgcgcgacgaggaaccgacgcatctgggcgtggccttcgacgtctcacgacgcaccttccgcaccgacatctacgaggactacaagggcacccgcgcgaagacccccgaggagttctccggccagatcgggctgatcaagcaggtgctggacgcgatgggcatcgcccacgccgagctcgagggtttcgagggcgacgacatcgtcgccacctggtcggcccaggccgacgcgaagggctgggagaacctgatcgtgtcgggggaccgcgacagcttccagctggtcgacgacaacaccacggtgctctatccgaagaagggcgtctccgagttgtcacgcatgacgcccgaggccgtcgaggccaagtacggcgtcagccccacccattatccggagctggccgcactggtcggcgacaccagtgacaacctcaccggcgtgcccggggtcggccccaagacggccgccaagtggttggcgaagtacggcgacctggcgaacctgctcgaccacgccgacgagatcaagggcaaggtgggcgacagcctgcgggcgcacctcgacgatgtgaagcgcaaccgcgagctcaaccgggaactgaccgacctcaagctgcccgtcgacgtcgagggcctggcgcgggccgagatcaatcgcgaggccgtccacgaggtcttcgacgtcctgcagttccgcaccctgcgcgaccgcctgttcagcgtcttccccgaggcgggggagaccaagggtgaggagggcttcgagctcgaggtcacccgtccggagccgggcaggctcggtgattggttcgcggcccatcgcagcgacgacccgatcggcgtggaggccaccgggcactggggcgccggaaccggggacatcgacacgctggccttcgcgacgaccagcgatgacgccgcatgcgtcgacgtgcccgaactgacccccgacgacgagaaggccctggcggcgtggctcaccgacccgcaggcgaccaaggccatgcacggcgccaagggtccactgttggccctgtgggcacgccagctcgaccttgcgggactggacagcgacacccaattggccgcctacctgctgcgtcccgaccagcgcagctacgacctggacgaccttgccctgcgccatctgggacgcgagctgcgggtccaggattccgagcaggtgaaccaggagaccctcgacttcgggtccgaacgccaacccgccgagaccgccatgttgcgggcacgcgccatcgcggagctggccggggtgctcgacggcgagctcgacgacaccagccagcgcggcctgctgcacagcctcgagatgccgctggaacgtgtgctggcgcgcatggagcagcggggcgtggccatcgacatggacgtgctcgaccagctgcgcagcgaatatgacgcgcgcgtgcaggccgctgagcaggcagcgttcgcggccattggcacccagatcaacctcggctcgcccaagcagctgcaggcggtgctgttcgaccagctcgacatgccgaagaccaagcgcaccaagtcgggttacaccaccgacgccgacgccctggagaagctgtaccagaagaccaggcatcccttcctcgagcacctgctggcctatcgcgacaccatcaagttgcgccagatcatcgacaccctcatcaagtcgaccagcgatgacgggcgcatccacaccacctatgtgcagaccgtggcgggcaccggccgcctgtcgagcaccgaccccaacctgcagaacatccccatccgcacccccgagggacgccgcatccgcgatgccttcgtgcccggcgagggcttcgagggcctgatgagcgccgactactcccaaatcgagatgcgggtgatggcggcggcctccggcgacaagacgctgatccatgccttcgcatcgggtgccgacttccactcgatgactgcctcgcatgtcttcgacgtgcccgtcgagcaggtgacgccggcccagcgctccagcgtgaagcagatgaactacgggctcgcctacggcctgtcggcctacgggctgtccagccggttgaacgtctcggtgcccgaggcgcgggcattgatggaccagtacttccagaccttcgggcccgtgcgcgactatctcgacagcctcgtggagaaggcccgcaagcagggctacaccgagaccatgctgggcaggcgtcgctatctgcccgacctgaactcgtcgaaccgccaacgtcgccagatggcggagcgcatggccctcaacgccccgatgcagggcaccgcggccgacatcatcaagaccgccatgctccaggtcgagcaggaactgtcggcctcgggcctcaggagccgcatgctgctgcagatccatgacgagctggtgctcgaggtggcggcgggggagcgcgaccgggtgcagcagatcgtcggcgacaagatgaagcatgcgatcgagttgacggtgcccctcgacgtgtccttcggctatggccgcagctggaacgccgcagcccactgagtccgttgcggcgctcgcatcagggtccggtcaccaggtcggcgtaatagagggcgcgcgatgccgcggcgtcgccgaccaggggatagtccgagcacaccacgatcaccagctgcgcgggaccgtcattgtcgtagaccagccccgaatcgggtcggtagtcgctgacccgcaccttgagtgccccggtgaaccggtaacagacgtcgcggcccccgccatccgagatgcggatcacgtcgccgggcgccaacaggccgtggttgagctcgttgcccagtgcccctccccatcggaaggtgtgcgaggtgaggaccgcccggccctgtgccgctcccggtgggacgctgcgatcgaaccagccgacggtgttgccgagatgggacggtggggaggccggtgcctgatcgggggcgacccccagggacatcatcggcatcgacctgcggtggccctcgagggtcatgcgggccccgaccaggggccggggctgcggatcgcaaccggccggcaccgcaccaccgccggttccgttggcaggcccgtgcgcgggaccggttcccgccagccccgcggaggccgcgtcggggatcggggcgccgggggcggtcggcagctgcttctcgtagtcgctgggggtgatcagcaccacccgccaggccaccagtcccagtcccacgaccaacgccaccagtgccagcaggcgcaccaggcggatcccggtcctcgtcatggcgttccccgttccggttccccgtctcctcgtctcccggcgggggaggcggcagtggggtggtggcgactatggcgcagcggtcagtgcgatcgatcggcagtcctgccgcgggtggcggcgggctcgcccggcgcccatgttacgggtccgttaagtgtccccgatcggcgggctgcgcctcgctgggcgcgcgctgcgcgagactacagtggtggcgtgagcgaacagatcagtcatgagcttcccgccgacactccgcgtaccttgtacatcaacggcaagaacgtcgaaggcgctgcagggacattcgatgtgacgaacccggccaccggcgaggtgctgacaagcatcgcgaacgccgatgtgacccaggcttcgcaggccctcgacgcagctgtcggggcccaacttgagtggcagtcgactgcgccgcgtgagcgtgccgacctgctgcgtgccgccttcgatgaggtcgagcggcgcaaggacgacttcgcccgggtgatgaccctcgagatgggcaagaccctggcggagagctacggcgagatcacctacggcgccgaatatgtgcgctggttcagtgagcaggccgtgcgcattgcggggcgctacatgcccaccccggagggcaacctgcgccagctgatcagcaagcgcgcggtgggaccctgtctgctcgtgacgccctggaacttcccgctgtccatggccacccgcaagatcgctccggcgctggctgcgggttgcaccgtcgtggtgcgcccggcgtcgtcgacgccgctcaccacgctgctgttcggcaaggtgctcgctgacgtcggcgtgcccgacggcgtggtgaatgtgatcacctgcaccgaccacaaggtggtcgactcgctgatcgatgatccgcgcctgcgcaagctgtcgttcaccggctcgacgccggtcggccagatgctcagcgcccaggcagcccaccacaacctgcggatcagcatggagctcggcggcaacgcggccttcgtcgtctttgatgacgccgacgtcgatgccgcggtcgagggtgccaaggcggccaagatgcgcaacatgggtcaggcctgcatcgccgcgaaccgcttcatcctgcatgagtcgatcgccgacgaattcaccgagaagttcaccgcgtggatgtcgtcgctgccgatcggtgacggcctggatcccaacacgaaggtcggtccgatcatcgcgaccaaggaccgcgacaacattgcggcgctggtggatcgcgccgtcgaggcgggcgcgaagctcgagaccggcggcgaggtgcccaccggcgtcggcagcttctacccgcccaccgtgctgaccggcgtgaagcccgatgccgagatcatgcgcaccgagatcttcggtcccgtggccccgatcaccaccttctccaccgagcaggaggcactcgacatcgcgaactcggtgccggtcggactggcgggttatgtgttcacgcgtgacttcgatcgcatccagcgcttcgccgagcgcatggagaccggaatgatcggcgccaacaccggactgttctcgaatgccgcagcacccttcggcggcgtgaaggaatcgggcctcggacgtgagggctccttcgagggcatcgaggaatacctcgagaccatctacgtggccctgccgaacccctggcgctgatcggtcgggtccggacgggcggtccaacccgccccatttcgtgggcaacatgccccatctcctgcccgggggatggggcatgaccatgccgcgtccgggttggtcaccgcgcgccgcatgtgccggcgatgacaacgtgatttgccatccggggggtcttttgcctcagcgtgaaccgcacagctagaattggtcagcgccgtgtacgccgctccagacctagtgtgtggcgtcgttgtcgatggtccggcccgtccctgcggacggacgggaattatcgggagcgaatcgccgttccgttcagcgggatgcgtttgcgcgcgtcacaatctcacatccatccaacatcggagccctactacatgacctcctccactgaggcgtcgaatcaggtcgcggtcgacgacatcgggagtgccgaagcctttgaggcagcggttgattccaccatcaagtactttaatgacggcgacattgtcaaaggcactgtcgtcaaggtcgatcgcgacgaggtcctcctcgacatcggctacaagacggaaggcgtcattccgtccaaggaactctccatcaagcatgacgttgatccctttgaggtggtcagcgtcggcgatgagatcgaggcacttgtccagcagaaggaagacaaggaaggccgcctgatcctgtccaagaagcgcgctcagtacgagcgtgcctggggcacgatcgagaagatcaaggaggaggacggcgtcgtcaccggcaccgtcatcgaggttgtcaagggcggcctgatcgtcgatatcggcctgcgtggcttcctgcccgcatccctggttgagatgcgccgcgtccgcgacctgcagccctatgtgggccaggaactcgaagccaagatcatcgagctcgacaagaaccgcaacaatgtggtgctgtcgcgtcgcgcctggctcgagcagacccagtcggagacccgccacaacttcctgcagcagctgcagaaggggcagatccgcaagggcatcgtctcgtccatcgtcaacttcggcgcgttcgtcgaccttggcggcgtggacggcctggtgcacgtctccgagctgtcgtggaagcacatcgaccatcccagtgaggtcgtcgaggtcggtcagccggtcaccgtcgaggtgctcgacgtcgacatggagcgcgagcgcgtctccctgtcgctgaaggccacccaggaagatccctggcagctgttcgcacgcacccaccagatcggtgagatcgtgccgggcaaggtcaccaagctggttcccttcggcgccttcgtgcgcgtcgaggagggcatcgagggcctggtgcacgtctccgagctggccgagcgccacgtggagatccccgagcaggtcgtctccgtcggcgacgaggtgctggtcaagatcatcgacatcgaccttgagcgtcgtcgcatcagcctctcgctgaagcaggcgaacgagggcgtcgacctgcgggccgaggacttcgatccgtcgctgtacggcatggttgccaattacgacgagaacggcaactacatctaccccgaaggtttcgatcccgagaccaacgagtggaagccgggctacgaggagcagcaggctgcgtgggaggcccagtacgccgaggcgcaggcccgttggcaggcgctgaagaagcaggccgaggccgccgaggaagctgatcagaaggcttctgtcgaggctgccaccagctacacggccgccacgcccgaggctcccgccgaggaggccggctcgctggcttccgacgaggccctgcaggcactgcgcgacaagctctccggtaactgatccatccggtacagctgatcatggaggggctccgaccgtcacggtcggggccccttctgtgcccacccggtgctgtgcgccggcaccatcaggacaactgctgacaaaggaatcccatgctgcacaccgacaagttccccgtgctcgagttcgatgacgacccccatgacctgatcggtcagggcgaggcgaagaccgtcgaggccgatcgctttccctcccgggcggtctttgccttcctcggacccgcgatcgacgaatacgccgccgacaacaagctggcggagatcgaccgcatcgagatgatcggggacgtctacccggtgtaccgggcgaaggtccccaccggagatgtggcactcatgcggatgccgctcggttcgcccgcggccgtcatgtgcaccgactacctgttccggttcggcgtgaagcgcgccctggcggtgggttcctgcggtgcgctcgaggcgctggcggagggcgagttgttcgtccccacccgggcgttgcgcgatgagggaaccagctaccactatctgccggcatcgccgtgggtcgacctggatcccaccatgcggggacacatcgaggccgcggtggcccgggccggctaccacacctcgtcggcacccgtgtggaccaacgatgcgttctaccgcgagacccccgagatgctcgcccatcggctcgcccagggctgccggatcgtcgacatggagtgctcggcgatggccgcctcggcacagttgcgcggcgccgacttcgcgcagctgttctacaccgcggacagcctgggcagccccgagggccatgaggcccgcgactggggctacagcgaacgggacagggcgctgcagctggccctggacgcgatctcccgggcgcaggcctgaaccgtggcgacgaatccggcatcaggggcaccccgcaagcccgcccgcgacacccggcagcggagccatcccggccagacgctggtgggcctgaccgggggcatcgcctcgggcaagagcgtggtggccggcatgctcaccgactgcggggccgtggtgatcgaccatgaccggctcgcccacgacgtcgtcgatgtgggcacgccgggactgcaggcggtggtgcgacgcttcggcgatggcgtgctgacgccggatcgggcgctcaaccgcagccgactgggcgccatcatcttcggtgatgcccgggcacgccatgacctcgatgcgatcatccatccgttggtctggaaggcatccgacgagctcgaggaccgggcccccgccgacgcggtggtggtgcatgacgtgcccctgctggtggagaccgggcagcaggacgacttcgacctggtggtggtggtggacgtgcccgaacccctccagttgcgccggctgatcgcccgcaaccggctgagccgccaacaggcactggcccgcatcggggcccaggcgtcccgggccgaacgcctggcggccgccgacgtggtgatcgacaattccggcagcctggacgccacccgcacccaggtggacacactgtggcggcgcctgacgggcgacgggcactgagcagtcggccggcctgacccgtcgagcccgggggtgccccgaacgggttgcgtggcgcacctaatatcggcggtatgcgccccgttgacaccatcacccgtaccgtcgccccgttcaaggtgcatgcggacttcgagccctcaggtgatcagccgcaggccatcgaggagctcgcccggcgcattgaggccggcgagcaggacgtcgtgctgatgggcgccaccggcaccggcaagacggccaccgtcgcctggctggccgagcggctgcagcgtcccatgctggtgatgcagcccaacaagaccctcgccgcccagtacgccaccgagctgcggggattcttccccgacaatgccgtggagtacttcgtcagctactacgactactaccagcccgaggcctatgtgccccagaccgatacctacatcgagaaggactccagcctcaacgaggaggtcgagcggctgcggtattcggccacgaactccctgctgacccgccgcgacgtcatcgtggtggccaccgtgagcgccatctacggactgggcacgccccaggagtacgtcgaccagatgatcaacctgaaggtcggccaggaatgggatcgctcgaacctgctgcgtcggctggtggaggtgcagtatgtgcgcaatgacatggctgcgacccgtggcaccttccgggtgcgcggcgacacgctcgagatcttcccgatgtacgaggagttcgcgatccgggtggagttcttcggcgacgagatcgaggccctcaccacgctgaacccgctgaccggcgagatcgtcagcgaggacaagcaggtctatgtcttccccgcatcgcactacacggcgggccccgagcggatggcccgcgccatcaccgacatcgaggcggaactggccgacaggttggccgaactggagaaggacaacaagctgctggaggcccagcggctgcgcatgcgcacgaactatgacatcgagatgatgcgccagatcggcacctgctcgggcatcgagaactattcccgtcacatcgacggccgtccggcaggctcgccaccgaactgcctcctcgactacttccccgaggacttcgtgctggtcatcgacgagtcgcacgtgacggtgccccagatcggcggcatgtacgagggcgacatgagccgcaagcgcaccctggtcgaccacggcttccgcctgcccagcgccatggacaaccgtccgttgcgcttcgaggagttcaccgaacgcatcggccagaccgtctactcgtcggcaaccccgggaccctacgaactggcccggggcaatggcgtggtggaacagatcatccgcccgaccggcctggtcgaccccgaggtgatcgtcaagcccacccatggccagatcgacgacctgatgggcgagatcaaggcgcgcgccaagaaggacgagcgcgtgctggtgaccaccctcaccaagaagatggccgaggacctcaccgactacctcatggagcatggcgtgcgcacgcgctatctgcacagcgaggtggacacgctcaagcgggtcgaactgctgcgcgaactgcgcatgggtgaatatgacgtgctggtgggcatcaacctgctgcgtgagggactcgacctgccggaggtgagcctggtgtcgatcctggatgccgacaaggaggggttcctgcgctccgaccgttcgctgatccagacgatcggtcgtgcggcccgcaatgtctcgggccaggtgcacatgtatgccgaccagatgacgccgtcgatgaccaaggccattgacgagacgaaccgtcgccgccagattcaggttgactacaacaaggcccacggcgtcgatccgcagccgctgcgcaagaagatcgccgacatcaccgacatgctcgtgcgtgaggacgccgataccgacaagctgcttgccgacacccggggcagcggccacgaggcgagcgccctgccgaccacgtccgacaagcacaagcgcggcgagaaccttcccgccaccgagctggccggcctcatccaggaactgaccgcgcagatgcattcggcggccggcgaattgcagttcgagctcgccgcccggctgcgcgacgagatcgccgacctcaagaaggagctgcgcggcatggtggaggctgccaagtagcggtttccgccgccggccgacgcgccgggcgcggttggtgctcaccgctgccggtgcaacaatggttgacgctaaggggagtactccatcctcgcagtagtcgtcagtacggccacgacaggtggcccggcgctgcgctccgggcccgcggtccggagggaagagaccttgcgtccgatggaggtacccggtgcacatttccctgctggtctggatcgtgaccattgtcgtgatgttggcggtgctcacgatcgacgcggtgatgttgtcgcggcgaccacatgtgccgagcatccgggaatcagtcaccgccgtcggcttctatgtcgccctggcgatcctgttcggcatcgccatgcacttctgggccggacccgcgtattcaggtgagttcttcgccggttggctgaccgagtacagcctgtcgatggacaacctgttcatcttcctgatcatcatgaccaagctgtcggtgccgcgtaaggcgcagcagttcgcgctgttggtcggcatcatgctggccctgctgttccggggcatcttcatcgggctgggcgccgcactgatctcacggctggcctggatcttcttcatcttcggcgcctggctgatctacaccgccgtggggctcgtccgggacttcatcaccggaagttcctcggaggaggaggaagacgccgccgacggtcccgcggtgcggtggctgaagaagatcgtgcccactaccggcgactacgagtccgacaagctgttcgtgcgcgtcgacggcaagctgctggccacctcgctgttcttcgtcgtggtggccctgggcaccaccgacgtgatgttcgccctcgactccatccccgccatctacgggctcactcaggagccctacatcgtgttcaccgcgaatgtgttcgccctgatggggctgcgccagctgtacttcctgctgggcggcatgttgaagaaactggtctacctgcccatcggactctcggtgctgctgaccttcatcggcgcgaagctcgtgctgcacgcctgccaccactacggatgggatgcgaaactgggcttcagcgtggagatccccacgagcatctcgctgatcgtgatcgtcgccatcctggcggtgaccgccctggccagcgtggtgcagatgctgcacgcccgacgcaccggcgccgtcgagggacccgcgccctcgtcacccggtgccggatccggcgacggctcctgagcccggggcccgtggacgggggcccggtgtggcctcaccagccgcgggcacgccattcgggtaggtgggggcgctcggcgcccagggtcgtggacttcccgtggcccggcaacacgagcgtgtcatcgccgaagcggtcgaagagcttcgtggtgacgtcgccgaacagggaatcgaactcgtcgtggtccttggtgcgtcccacgccccccgggaacagcgagtccccggtgatcagcaccgtcgggttggtcggcaggacgagcgcgatcgatccgggggtgtgccccaccaggccgatcacctcgagggcctcgtcgccgaccaggagcgtgtcgccggtccacacggtgcggcactgcacgccggtctgttccgcgatcgaggcggcatcgggcccgccgcaccagggcgtggctccggtggcctcgaccaccgcggcgagggccccgatgtggtcaaagtgctggtgcgtggtgatcacggcgtccagggtgcgcgggccgatccactcgagcagggtggccggttcggtggccgcgtccaccagcaccaggtgatcgtcgctgctggtcagcaggtatgcgttgttctccatggagccaacgctgcgtgattcccacttcatgtcaggcccaccatccttcgggtagtgcgggcagggtcttcgccaccgacgggtcgtcgggcaggcggttggtcagccagccgagcaggagggcgtcggagccgcccaccgcagtgggacgtcccgtgccaccgagccgggtgtggaagccggaggtggattcgatctgcagcggggccagtcggggatcatcgccgatccagtaacaggtccactccagcacccagcgggcgatgtcgtcgtcgatgtcgagcacggtgaatccgcaggccaggtcgacgtggtgcagggccacctcacgcagcctggccagcggcaggaggtcgatgcgcagcttgcggcccggcgagatctccacgagtcgggagccgtcgatatcgcccagctcgtcgagcccgtggtagagccggccggccgaggtgtccaggtcaacctgcaggtcgagtgcacgacgttccgagccgcgctcgatgtcgttgaagcgttcgcgctccgagatgtacagcggggtgttgatgccggtcatcatgccggccgcgacgcgcgtgaaggcatctgcgttgcgggccaggtgggtggccacgtgggcgcgggtccaccccggcaggtgacacggctcctgccagctgcgctcgtcaatggcgatggtgtcgcccaacagccgctgggtcgcctccagcttgcgcaggcgtatcggacgcatgtccccggcgccgggaagctccgattgctcctccaccgatggcatcgcgcacctcctgcccggcctgtcggacccgcctcgcgtgcagctgcccgccaccgcagggacctccgtcccgcgcggggcgcgcaccacaacatcaataagttatgacaagaacctacctgcacgaggcgcgtcgggccatcgcgcaccgcgatcggcggggtcccggcgactggtcgctggtctggaaatgtcagagccgctacgtaccatggagcccgtgaacgatcgacttgtcatccgcggtgcccgcgagcacaatctgcgcaacgtcagcctcgacctaccccgcgacaagatgatcgtcttcaccgggctgtccggttcgggcaagtcgtcgctggcattcgacaccatcttcgccgagggccagcgccgctatgtggagtcactgagctcctatgcccgccagttcctcggacagatggacaaacccgacgtcgacttcatcgaggggctgtcgccggccgtctccatcgaccagaagtccaccagtcgcaatccgcggtccacggtgggcaccatcaccgaggtctacgactacctgcgcctgctctatgcgcgcatcggccacccgcactgcccgatctgcggcgccccgatcagccgccagacaccgcagcagatcgtcgaccgcctgctggggctcgacgagggcacccgcttccagatcctcgccccggtgatccgcggccgcaagggcgaatacaccgaactgttccgccaactcgccaccgacggttatgcgcgcgtgcgggtcgacggcgaggtgcaccagctcgacgacgttccggccctcgacaagcagcgcaagcacgacgtcgacgtggtggtcgaccgcgtggtggtcaaggccagcgccaagcagcggatcaccgactcgatcgagaccgcgctcgggctggccaacggggtggtttcggtcgacttcgtcgatcgcgagcccaaggatccgatgcggctgcgcacctactcggagaagatggcctgccccaacgggcacgacatcgagatggacgagctggagccccgccagttcagcttcaactcgccatggggagcctgcccggcctgcaccgggctcggcacgcaactggaggtggaccccaccctcgtggtgcccgacgagacactcaccctggccgagggcgccattgccccctggtcgacgccgaccctgcgcaaccactacgcgaaggtgttccagggcctgggggagaaggagggcttcgacgtcgatacgccctggcaggacctgccgggcaccgcccaggccttcatcctcaagggctacgacaacccggtctatgtgcacttccgcaaccgcttcggacgcaaccgcacctatacgcagaagtacgagggcatcctgccctatgtgcgtcggcgcttcgacgaggccgagaccgatgccgcgcgcgaccgctggggcggctacctgcgcgagatcccctgctccacctgccacggggcccggctcaagccctcgtcgctggcggtgacggtgggcgaggtgaacatctcgaccctgtccgatatgtcgatcagcgaggtcaccgggttcgtcgaccagctcgacctgaccgaccgggagaagcagatcgccgaacgcgtggtcaaggagatccgcgaacgcctgcgcttcctgctcgacgtcggactcgactatctgacgctgtcgcgtccggccggttccctgtcgggtggcgaggcccaacgcatccggctggcgacccagatcggttcgggcctcaccggcgtgctctacgtgctcgacgagccgagcatcggactgcaccagcgcgacaaccgccgcctcatcgagaccctgctgcggctgcgtgacctgggcaacaccctgatcgtggtcgaacacgacgaggacaccattcgcgccgccgactgggtggtcgacatcggccccggcgccggtgagcacggcggccatgtggtcgtctcgggcaccctcgatgacctgctcgcctctagggagtcgatcaccggtgcctatctcaccggacggcggcgcatcgagatcccggcgcaacgccaccggccgaatggccacacgatcgccgtgcacggtgccgccgagaacaacctgcgcggcatcgacgtcagcttcccgctgggccagttcatcgcggtcaccggagtgtcgggttcgggcaagtcgaccctggtcaaccagatcctctacaccgcactcgcgaagcgcatctacggcgcgaaggccgtgccggggcgccaccattcgatcaccggcgccgagaacattgacaagatcatccacgtggaccagtcaccgatcggacgcaccccgcggtcgaacccggccacctacaccggcgtcttcgacaagatccgtgggctgttcgcgcagacccccgaagcgaagatgcgcggctaccaaccgggccggttcagcttcaacatcaagggcggacgctgcgagaactgccatggtgatggcaccatccgcatcgagatgaacttcctgccggacgtctacgtgccctgcgaggtctgccacggtgcccggtacaaccgggagacccttgaggtgcactacaagggcaagagcatctccgaggtgctcgacatgcccatcgaggaggcggccgagttcttcgaaccgatccagtcgatccatcgccacctcgcgaccctggtggaggtgggcctgggatatgtgcgactcggccagcccgcaaccaccctgtcgggtggcgaggcgcaacgcgtgaagctcgccagtgagctgcagaagcgctccaccggacgcaccctgtacgtgctcgacgagccgaccaccggcctgcacttcgacgacatccgcaagctgctcaccgtgctcggcaagctggtggacggtggcaacaccgtggtggtcatcgaacacaacctggacgtgatcaagacggccgactgggtgatcgacatgggccccgagggcggagcgcgcggcggcatggtgatcgcccagggcacgcccgagcaggtggcggccgaccccgactcctacaccggccagtacctggccgagatcgtcacgcccgatgccgcgaaggggcccctggagccccccgcggaggtcgcggcggcacccggacccgccccgaagggcaccaggggcagggcgtcgaaggccggcaagccggccacgcgcacctcgggggccaagaaatccggtgcgcgggcatcggccacgggtcgggggacggccacgaagaaggcggtcacgaccaagaagaagacccagcgcaaggcggcgtgagcccacccgtcggttcagatgcaggtgtcgttgtcgagccggtagaagcgggtgatgcggcgcgttccgtcggcccgcagcaccttctcggccgacttgtgggtgaagctggcacccagcttgagcagggccttgttggaacgctcatcgaggtcgtcggcacggaagatgatgcccgaggcgtcattgctgcgggccatggtcaccatgacgcgcttcacgcgcaggttcagccctgtgccccaggtgctcggcgtcagataggtggcaccgatctcaacggcctcaccggcccggaagtggctcgtggtgcccaccacctcgccgcgcagcaccacggtccaggtgagccgctcgggcccatcggtgcgctggcccatccgtcgcgccaggtcctgggcatccaggggcaccccacgcgggttgaactgccacacctcgggcgcctggagggcgcgccagagccgatccatgtcgcgctgggcatcccagcgttcgatggtgagatccccgctgacgaaggatgtctgcggaaatggccactgcaacattgcgtgactccttgggacgatgtcccaccgagactagcgcctaccgctgcacggcgcgcgttatcgccccgatgggccatcccggtgccgtgacgccccatccccgtgcccggccgcgcggggcggggcacggggaggtcgtcacaggctctcgtgcgacatggcctcgcggatgctcacccggccatgggtctgcagcagggcccggcggtagatgcgcgagccgaaccagatggccaccacggtgaaggcgagcgtgatcagcagtgcgatgagcccctcccaccaatgggccgtgcccatcgccaggcgcgtgggcatcaccaccgaggagatcaccggcacatagctcaggaccaccgccaggttgcccttcgccaggaagcccgcgaagtagacgaccatcagcagccaggtcaggggctgcgccgtcgactggaggtcctcggtggtgggggccatggcacccgccgcggcccacaggcacgacagcgtcaggaagcccaccaggaagaaggcgaggaaccagccgatgccccctgacaggctcggcaacatcgtcgacaggggcgtcacggccaccccgatcagtgcgatggccgcgtagagcaccatctgcaacaacgcgacggccgtgttcccggccaccttgccgagcatcagctggcgggcgggcaccacggcggccaggatctcgacgatccgcgactgcttctcggccgtgacggactgggcgatctgcatcccgaacatcagtgaggagaacatgaagaccatcgcgaagacgatgcccaccagctcgccaccggggttctccgagctctccagcacatcggtggagaccgtcatggcggcatgtgcccggtcgagtggctcgcccgcccgtccggcgaggtcattgaccacgttggtcgacacggcggcgctcacatagttctcgaggctggacttggtgtcgtccttgaaggtcaggtgccagctggtgccatccgagtgcaaccaggcgtcggcgtcaccggcggtcacctcggagcgggcctggtcgtcggagtcggcgtggcgcaccgacagctcggagtgatcgttggcggccccggcgagggcgccggcccgttcgccgacctgttgggcctgctgggtggtgaccaccacgctcatggtgtcggtcttgttggcctgccaggcgccgaaggcgatgccggcggccatgagcaccaccatcgtcagcgtggagatgatgaagctcttgttggcgagcttcacccacatctcgtggcccgccaccagggtccattggcgcttgttcacttcgtcacctctcggtagatgtcggcaaggctcgggcgcaccaacgccagctcgatcacatcgccgtggtcgatggctgcccgcagcagcccctgacgggcccggtccgaatcgaacgacaacagggccgtgggtccggcgacgtccagcaccgtcgttcccggtgcgtcacggacccatcccgtgtcgctggtcatggtgagtcggtagtggttcgtgccgcggtcgcgcagctcctcgcggccgccctgcgcaacgaccctgccgtgcgagaggatcaccagcccgtcgcacaagcgctcgaccaggtcgagttggtgggagctgaacagcagcggcgtgccggccgcggtacgcgtcttcaacatctgggccagcgagtcgaccgcctcggggtctagcccggagaacggttcgtccagcaacagggcagtgggctcggtcatcacggcggcactgatctgcacccgctgctggttgcccagggacagcttctccagcttgtccttggcccgatcagccagcccgaaggcctccaacagggtggtggcctctgcggtggcgccggcccggctggccccacgcaggcgggccaggtagaccagctgttccagcacgggctccttgggatacaggccgcgttcctccggcatgtagccgaatccgcgccgatcggcggcggtgatcgggcgcccatcccactgcacgtggccggaatcgggggtgagcagccccatgatcatgcgcatggtggtggtcttgccggcgccattgccgccgacgaagccgatggtcttgccgtcgggcacggtgaagctgacatcgtctaccgcgatgagctcaccgaaacttcgggtgaggtgatctactgcaagcatgtgaccagcctgccggcaccgccgcgcccgcacatcgggcggacgacggaaatcgggtctccccccaacggatgaggccgggccgcggggccgcggtggtgactaggacaccaggccgtgctggtaggcgtgcgccacggcctgcacccggtcgcgcaggcccagcttggacaacacattcgacacatgtgtcttcacggtggcctccgagacgaacagctcggcggcgatctcggcattggacaggccgcgggccagggcccgcagcacctcgacctcacgatcggtgagcctggcgagctcggcgtcggcaccgggcgtgacctcccgcggggcgtggccctgcgccatcgcacggatcacccgcagcgtcaccgagggactcaacagggcatccccgttcgccaccgcacgaacggcggcaaccagttcggtgggatcggagttcttcaggatgaaaccgctggcgcccgcacccagcgcgtcgaacaggtagtcatcgcgatcgaaggtggtcagcacgatcaccctcgcggagtcggcggcgacgacctcacgggtagcggcgattccgtccatcgtgggcatctgcacgtccatcaacaccacatcgggatgcagccgggcggccgcggacaccgcctggcggccgtcggcggcctgaccgaccacctcgatgtcgtcctcgacgcccaggatcatctcgaatccggtacgcaccagcgtctggtcatcggccagtagcaccctgatcatgttcagccctcctccaggggcagacgcatccgcacccgatagccaccgatcatgcggggtccggcctccaccgtgccgcccacgttcttcgcgcgttctctcatgcccagcaggcccagtccgcttccggtggaatcgggccgtggcagtccggaatcgaggatctcggcctccgcatagcgtcccgcctcgacccgcacgaccacctgcgcctcgtgggcggtggagtggcggcgcacattggtcagcgcctcctcgacggcgcggtacaacgagagcgccaccaccggcgggacctgtgcggcagcccccggcggattctccaccacgtcgagggaaacctgcaggtcatggccctgctgggcggcaaccaggtcgggcagctggaccagcgtcggggccccatggggtgagtcggcggcgtcctcatcgacggcacgcagcgtgccgagcaggtcgcgcatctgggtgacggcctggcgcgtcgattcctcgaccacggcgagcgccgccgcggccctcgccggatcgcgttccagcacccggcgggcggcggccgcctggataccggtcaccgagacatggtgacccaccacatcgtgcaggtcgcgggcgatccgcaggcgctcgcgcagcacggcctcatctcgcagctgatcggcctgcgcggtgagctgcgcctgctgggcgacgatctcggcattgcccctggcccgtcgccacgacgagaccccgaagatcaacgccccggccaggaaggcaccgttgatgagcaggttgaacagcagataggcgaccagcggtgagatcagcgcattgcccgggtcgagcgtgttgagttcaccgcgcagcctctcggcccccgccccgaccgccaacgaccagatgagccagaagatgatcgtgccggcgaccaccccgatggtgaccagcatcccgggccggttcggtgcccacgccgcggccgagtacatgctcaggaagaaggcgacgagcaggatcagctggccgcccaccatcggcatcatcatcgacaccgccatgaacgccacgtacgcaaccaccgccgacgtgcagggatagcgccgtcgccacagcagcgggacgcacgttgcggcgagcagggcataggtgaccgggcgcgatgacgggggcgtgcccaccgaacccaggccgcgctgcaattccgtcagcacggctgccagcaccgtgagggcgacgacgaccagcacgtcctcgcgcccgacgcgcggaaccggccgctgccaggggtcattgataccggcccacgacaggaaacccgaccagggtcggggccgcactggtgctgttggcgtctccacgctgagcaagactaggggaatggcgctgcgggcccgaccgccaccggggtcggggggagtgcctgccgagcgccacggcgtgcccggtcgccacttcggtgggcgtctaggctcggaatcatggccgatccgtccacctatcgccccgcgcccgggtcgatcccgaccgatccgggcgtctaccgtttctccgacgagcacggccaggtcatctacgtcggcaaggcgaagaacctccggaaccgcctcaactcctatttccacgacatctccgcgctgcatccgcgcacccaacggatggtgcgcaccgcggcccacgtgcagtggaccgtggtgcagaacgaactggagtcgctccagctcgagtacacctggatcaagcagtacgacccgcgattcaacatcatgtatcgcgacgacaagacctacccgtggctgtgcgtcacctggtcggacgagtacccccgcgtctacgtggggcgcggcgccaagcgcaagggatatcgctatttcgggcccttcggccaggcgtgggcggtgcgcgacaccgtggacatgctgttgcgcatcttccccatgcgttcctgctcggcaggggtcttccgcaatgcccaggccgccggacgaccctgcctgctcggctacatcgggaagtgctcggcaccgtgcgtgggccgtgtcagcgccgcggagcaccgcgagatcgccgacgacttctgcagcttctgggaggggcgcacccgccagctgcagcacaagctgaccaagcagatgcgccaggccgccgagaacgaggagttcgagcgtgccgccgtgctgcgtgactcgctcggagcactcgacaaggcgaccgaacgcaatgccgtggtgctgcccgacggcaccgacgccgatgccattgccttcgcgctggatccgctcgagctggccgtgcaggtgttccatgtgcgcggcgggcggatccgcggcgaacgcagctggatcgccgaccgggccgatgacgccgacgaatccgagttggtcgagtccttcctgctccagctgtactccgactcgcgggtgccccacgagatcctggtgccggtgatgccacccaccgccccggtgctcaccgagatgctcggcgagcagcgtggcgggcgggtgaacctgcacgtcccccaacgcggcgacaagcgcgtgctgctcgacaccgtggccaagaacgccaccgaggccctcgatcgccacaaggccaagcgggccgccgatctcgccacgcgcaatcaggcgctcgaggaactccagggggccctcggactgcccgaggtgccgctgcgcatcgagggctatgacatcagccacctgcagggcacccaggtggtgggttcgatggtcgtcttcgaggacgggctgagccgtcgcagcgaataccgccgcttcgtgatcaagagcttcgagggctccgacgacctgcgggccatggacgaggtgctcacccgccgcttcagccggttgatcaacgaccgcagggccatggaggaggcgagcagacagggcgggcccgggctcatcgaccccgagaccggcaagcccctcaagtttgcctatgccccgtcgctcgtggtgatcgacggtgggcccctgcaggtggaggcggcccagaacgccatcaccgccctgggcctggcggaggtgcgcgtgatcggcctggccaagcgcctggaggaggtctggctgcccgaccaggacttcccactgatcctgcccagggactccgaggggttgtacctgctgcagcgggtgcgcgatgaatcccaccggttcgccatcacccaccaccgtcagcggcgttcccgggccatggtcgaatccgtgttggatgacgttcccggcctgggtgcggtgcgccgcaagacggtgctgtcccacttcgggtcgctgcgcaagctgcgggctgccaccgtcgaccagatcgccgagctgcccggcctgggcgccgcgaccgcgcaggccatcgtggacgcattgcgtgccgatcagcccggtcaggccatcaacgtgaccaccggcgagatcgtcagcgagggtcccgccccccacgaggacgccagcggggccggccaaccggcctgaccggtgggcgcgccggcccgctggtcggtgggaaggggccccgacgggaaggagtcccggtgggaacgagcccgacgggatggagcagcgtacggcgaccccgctcggggcgcacggatgcgtcatggcccgccgccggaacggcgaaaagctccatttcggggcacccgccgtcatctcggcaataattggggcgtgaaccagacattggcgcccagccttccgaagcatccccgcacggtcatcatcaccggtctgtcgggcgccggccgacgcacctgcgcccatgccatggaggacctcggctggttcgtggtcgacaacctgccgccgagcatgctgccgcagctgatcggcaccgccaacaactcgggcttcacccggctcgcggtgggcctggacgtgcgcagtcgcgacatgttcgagcagctgccgatggtgttcacccagctggaggccgacggcatctccccggagatcgtcttcctggaggccagcgatgaggtgatcgtgcgccgacaggagtcgagccgacgtcggctgccgctgcagggcgatggccgcctcatggagggcatcatcaaggaacggcgcatgctgtccgacctgcgggccagcgccgacatggtgatcgacacctcgaatctcaatgtgcaccagctcaccgcccgggttgcgcacatctatggcggcgacgtggccgacaccctgcgcgtgcaggtgatgagcttcggcttcaagaatggcgtgccgctggacgccgacctcgtcttcgacgtccgcttcctgcccaatccgcactgggtacccgagctgcggccccagaccggcctgtcgaaggaggtcagcaactatgtgctggagcagcccggtgcggaggagttcctgaccaccctcgaccacctcttcgaggtggtgacgcccggatacctgcgcgagggcaagcagcaggtgacccttgccatcgggtgcaccggcggcaagcaccgcagcaccgccatcagcgaggcgctggccggcaggctgcgccaccggggcatgcaggtgagcgtcctgcaccgagacctggggctggaatgagcggcggcgagctgccgtcggtggtggcgctgggcggcggccacggcctgtccgcctcgttgtcggcgctgcggcaggtgaccgatcagctgacggccgtggtgaccgtggccgatgatggcggcagttcgggacgactccgggaggaattcggcgggcttcccccgggcgacctgcgcatggcgctgggcctccgtgctgcagtcgcggttccgttccgagggcccgttggacggccacgcggtgggcaacctgctcatcgagggcgtctggcaggcgatcagcgacccggtccggggcctgggtctggtcggggagctcgtcgatgcgcgcggacgggtgctgccggcctccaccgagccgttgaacatcgaggcggacgtgctcggcctggaggtcgaattccccaacgaggtgcacgtgctgcgtggccagcacatggtggcctccaccaacggccgggtgcaggcgatccgcctgctgcccgccgacccgcccgcctgcccgcaggcgctcaccgccatcgagcgggccgactacatcgtgctggggcccggctcgtggttcacctccgtgttgccgcatctgctcatcccgcagctggcggccgccatcatcgccagcccggcccacaagatcctgacgctcaatgtgacctcggggttggagaccgccggcttctcgcccagccgccacatcgaactgatcgccgagcatgctcccggcctgcgactcaatacagtggtcgccgacgaggccttcgccgcctcggatgcggcgttggccgagacatgtgcaacgctcggggccgatctcgtcgtggatgatgtggcgatgcacgaccacacggcacggcatgatcggttgaggctcgccgccgtctaccgcgaggtgatgggcggcgccgaggcagaccttgagatgtgagagccccattggtgacgacgagaaggacaacgaggacagattgatggcactgacacagcaggtgaaggcggagctggcgaccgttggggagctgaagcccgaggcgcgtgccgccgaggtggccgccatgctgcgtttcgccggcggcatccacgtggtgagtggccacatcgtcatcgaggccgaactggattctggcaacgcggccaggcggttgcgcaccgcgctcgcggagctctacggcttcgattccgaggtggtggtggtcaatgcctccgggctgcgtcggcgcacccgctatgtggtgcgcctggtgcgccacggtgaggctctggcacgtcggaccgggctgatcgaccagcaccggcgtcccgtgcggggactgcccgcccaggtggtcggtggatccatgcaggaccaggtcgccgcctggcgcggggctttcctggcccggggctcattgacggagccgggccgttccatgggcctggaggtcacctgtcccagctcagaggccgccctggcgctggtcggctgcgcacgtcgcctgggaatcagcgccaaggcgcgcgaggtgcgccagatggatcgggtcgtggtgcgcgacggcgacgcgatctcggcgttgctcacccgcatgggggcccacgagtccgtgctcgcctgggaggaacgccggatgcgtcgggaggtgcgtgccagcgccaaccggctcgccaacttcgacgacgccaacctgcggcgctcggcccgggccgccgtggcctccagcgcccgggtggaacgcgccctggagatcctcggtgatgacgcccccgatcacctgcgggcggccggcgaactgcgcctggcgcaccgccaggcgagcctcgaggagttggggcacctcaatgacccgcccctcaccaaggacgcggtggccggacgcatccgccggctcctcgcactggccgacaagaccgccaccgatcgtggcgtccctacgaccgaggcggcactgacgccggagatgctcaccgagaggtagcacccgacgatccacccgcggcctgatgcgcggcgagggccggtgcgtgaatcgtgggacccatgatgagtcccgatgatccacgcgaggcactgcatgccgcaggcctgaccaagaactatggcccggtgaccgcactggcgggcgtcgacctcgcggtgcgccgcggggagacgctggcggtgatgggcccttccggttgcggcaagtcgacgctgcttcatgtgttggccgggatcctggttcccgatggcggggatgtccatttcggcgggcggtccattggtgggttgtcggaggcggggcgtagtgcgttgcggttgtcgtcgttcgggttcgtgttccaggacgggcagttgttggcggagttgacggtgcaggagaacgtggcgttgccgttgatcatggcggggttgtcgcgtcgtgaggcggtgggtcgggctcgtggttggttgggtcggttcggtctggcggggatggaggggcgtcgtcccggggagttgtcgggtggtcaggcgcagcgggtggcgattgcgcgggcgttggtgcatgggccgggtgtggtctttgctgatgagccgacgggtgcgttggatcagggcacgggtcgtgaggtgatggaggtgttgacgggttcggtggcggctgatggggcgtcgttggtgatggtgacccatgatccgggtgtggcggcgtggtgttcgcggacggtcacgatgagtgatggccacatcatcgccgacaccgccacggaagccggcatgaccccgggggagtcactgcgatgaggccgcaatcacttgtcagggtcgccgcgctcgtgacgcgccccggccgtgggggttcggcccgtgatgcgcgcggggtgctcaccgtgttgtccgtcgtggcgtacaccgtcgtgcaggcgctcgccctgtcggtcgccgcaggggtcatggtcttcgtcgaccacgaccgtcatccatcgaaccgcttccaggccgacaattcgggcatctacgtgttgctggcgatgttggcgggggcggtgctcatcgcgccactcgtggtgctgtgcgcggccgcggcccggatgggggcgctgcgccgggcgcgccggctgtcgatcgtgcggctgctgggcggcagtcccgccgaggtgcgcaccatcggcgtcatcgaggcattcgggcatgccctggtcggcgtggtgggcggcacggtggtctacctggccaccctgccgctgtggtcgccgctgcacttcgaggggcaggcgctcagcgccgcagcgatgtggatcgggccgctcgggctggggctggtcagcctcgccgtgctggtgatcgccactgcctcggccgtgatcggcctgcagcgcgtggcgatctccccgctgggtgtcgtgcggcgcacggccgcccccgggctgaagaaggcccggctgatcgttccgctggtgatcgtcgtgggctgggccgtggccggccagctgatcagcgacaccggcttcgtggtggtcgtcggatccatcgtgctcgccctggcggcgctgctcgcgggggtcgacttcgtggggccgttgctggtgcagtggctgggcaatgcaatggcatcgcgggccaacagtgcggcctcgctgattgccgggcggcggatcgccgacgcaccgaaggccacctggcgggccgtgggtgcgttgtcgatggcgagcttcctcgcctccttcaccgccatgctgccgctgttcggcaacggttcggactccgaccaggacatggtcgtgctgctgggcgacatgcgctagggcgtgctgttgacgctgtccatcgccttcctgctcacggcggtgtcgtcgggactcaaccaggccgccaagatcctggaccgcatcggggacgcccgcaccctgtcggtcgccggggccccgcgcggcctgctgacggcgatccgtcgccgggaggtgctcgtcccggtggtcgtcgccaccgtgatgcccgccctggccggattggccttccagttcccgttcaccggacccctgatcacgcagcgtcccgacatgctgatcacgctgctggctacgctcgtcgctggcattgggctggtatttgcggtacaggagtgctgcagtccgttgcagacccggttgttgtgtgagcaacaacgttcaaccgactgattgtttgcttcgcaccattccttgcaggctcccgcacggataggctggaggttgtcaacaacacctgtctgatgcctgagcacagacataagaaccgtgaagggatcgtctatatgaccgtcaaggttggtatcaacggtttcggccgcattggccgcaacttcttccgtgcgatggtggatcagaaggcggacttggacatcgtcgccgtgaacgatctgaccgacacgaagacgctggcccatctgctgaagtacgactcgatcctcggccgcttcccgggcgagatcacctacgacgacaactcaatcaccgttgatggacacaagatccaggtgtgcgaggagcgcgatcccgcgaaccttccgtggaaggatctcggcgttgaggtcgtcgtcgagtcgaccggcctgttcaccgatggggagaaggccaaggcccacatcgcggccggcgccaagaaggtcatcatctcggctcctgccaagaatgttgacgccacgttcgtgatcggtgtcaacgagcaggagtacgacacctccaagcacaacatcatcagcaatgcgtcctgcaccacgaactgcctggccccgctggccaaggtgttcgaggatgagttcggcatcgagcgtggcgtcatgaccacgatccacgcctacaccggcgaccagcgcctgctcgacgccccgcacaaggacctgcgtcgcgcccgcgctgccgcgatcaacctgatcccgacgaagaccggcgccgcccaggccgttgccctggtgattccggccctcaagggcaagttcgatggtctggccgtccgagtcccggttcccaccggctcgctgaccgacctgagcttcatcccgggtcgcgaggtcaccgccgaggagatcaacgccgccgtcaagaaggccgccgagggcccgctcaagggcatcctggcctacaccgaggacccgatcgtctctaccgacatcgtcactgacccgcactcgagcatcttcgatgccagcgagaccaaggtcattggcaacctggtgaaggtgctgagctggtacgacaacgagtggggctactccaaccgcctggtggacatcaccgagctggttgccgacaagctctgatccataactcaataccgtgatcacacagggcgtgctggcttcggctggcgcgccctgtgtgggtatcggggcgtgaccaccgagctcccggtcccgcacgatcggccggtgggccgggcatccaccatcgacaacatcaaccaccagttttcaggagatgaacagtgagaaccctttcggatctcggcgacctgcgcggcaagcgcgtcgtcatccgctgcgacttcaatgtgccactcaagggtgaggaaatcaccgacgacggacgtatcagggcagccctgcccaccctcgaggcactgctgggccagggtgcccgcgtcaccgcgatggcccacctgggccgccccaagggcaagcgcgaccccaagctgtcgctggccccggtcgccaagcggctcgccgacctgctcggccagcacgtcgagttcgccaccgacaccgtcggactgtcggcgctgaaggcctcggcgaacctcaacgacggcgagatcgccctggtcgagaacgtgcgcttcgagcccgccgagaccagcaaggacgacgccgagcgcatggagctggccaagaagtacgccgagctgggcaactacttcgtctccgatggcttcggcgtggtgcatcgcaagcaggcgagcgtctacgacatcgccaagctgctgccgagcgcggccggtgaactggtgggtaaggaggtgtcggtgctgtcgaagatcacccacgaccccgagcgcccctatgtggtggtgctgggcggcgcgaaggtggccgacaagctggccgtcatcgacaacctgctcaaggtggccgacaccctgatcattggcggcggcatggcgtacacattcctcagggcccagggcaagcaggtcggcggatcgatcctcgacgcctcgaaggtcgacgcctgccgtggctacctggccgacgccaaggcggccggcaagtcgatcctgttgcccgtggacgtgcgcgtggcaaagggcatggacctggacgcccgcaccgtcgacggcccggtctcggtggtgtcggtcgacgacatccccgccgaccaggagggcctcgacatcggtcccgcgaccgagaagctgttcgccgagcagatcgccggcgccaggaccgtgttctggaacgggcccgcgggcgtctcggagatcgatgagctcgccaacggcaccagggcgatcgccagggcactggccaccggcgacgcattcagcgtgatcggcggcggcgactcggccgcagcagtacgcaagttcggatacaccgatgatcagttcagctggatctccacgggcggtggcgcttcgttggagtatctggagggcaaggaactgccgggtctggcagtcctggacaaggagaattaagcatggcacgcaagccgatcatggcgggcaactggaagatgaacctgaaccacatcgacgccgtcggtctggtgcagaagctggcgttcacgctggccgacaagggctacgaccccgagcagtccgaatgcgtggtgatcccgccgttcaccgccctgcgcaccgtgcagacgctcgtcgagggcgacaagctgccgatcgtctacggcgcgcaggacctgtcgccccacgatgacggcgcctacaccggcgacatcagctcgtcgatgctcaccaagctgggttgcagctatgtggtcgtcgggcactcggagcggcgcgagtaccacgccgagaccgacgaggtcgtcaacgcgaaggcccgcaaggccctcgacgccggcctgacgccgatcatctgcgtgggcgagagcctggaggtgcgcaaggccggcaagcatgtcgagcacgtgttggcccaggtcaccggcgcgctggccggcatcacggccgagcaggctgcctccctggtgatcgcctatgagcccatctgggccatcggcaccggcgaggtggcgacccccgaggacgcccaggaggtctgcggcgccatccgtgccgccgtggcggacctgtacgacgccccgaccggggacgccgtgcgcatccagtacggcggctccgtgaagcccggcaccgtggcggccatcatggcgaagcccgacatcgacggcgcactggtcggtggcgccagcctcaaggccgatgatttcgccgccatcgtgcgcttctacgcgatggcacaggcctgatcagctgcccgatcactgtgtgaggggcccggcagccacggcgctgtcgggccctttcccggcccgtggtggcacagcgtcggttcgggtaaaccgccacggtgggttaacattgccaagtgatgctagttccacttatgacgtggccgacgattaccctgtcgatcgtcctcattgtcctcagcttcgtgctcacggcgttcatcctgctccaccgcagtcagggtggtggcatgggtgacctgttcggcggtggaatgtccacctccacaggtggcacctcggcagcggagcgaatgctcaatcggctcaccgtcatcatcggtcttctgtgggttgcctgcatcctcggcctgcttgtgctctacaagcacatcggctgaccgtcaaccccccttgtaggcttcattcttgaagtctgaattcatcaagactcagcaaggagcacaatccagtgtcaagtggcagcgctatccgcggcagccgtgtcggtgcaggtcccatgggggaggcggagcgcggcgaggtcgcaccccgcatccaggtttcctattactgcgcgcacggccatgtgacgcgtccctcattcgcctccgaggccgccgttcccgatgactgggagtgcatgaagtgcggtctcccggccaatcgggaccccaagaacccgccgccgccgccgaagacgcagctgtacaagacgcacctcgcctatgtgaaggagcgtcgcagcgacaaggaggcccaggcgatcctgtcggaggcgctggcgcacctgaaggaccgccgcgaccgcggtgaggtcatctactagggacgcagagcccccacaggccagtacaaacggttcggcccggacaccacggtgatatgccagtgtccgggccgaactgcgtccggcggcgctgagtccggttgcgctgagtctggctgcgctgtgtcctactgcgccgtgtctggttgtgctgtgtccaactccgctgcgctgcgtcgggccgaaccgcgtccgggccaactgtcctgtgtgccgggtcgcagcacccctgcgcagggcgccgcagcgcgaggggggattctccccggtgcgggcttgtccgcagggttaccggcggggcctcagcgtgggggattcacagatcgcaacgaaagcaggggagctccccggcggcgtcctgatcggcgaaccacagtgtccagtcggccccgtgggcctggctggcagggtagcgggactcgccgcgcagcgatccggccagcgcgtcctgcttggtcgctccggaggcgagcatccacacctggcgcgaacgattgatggccggcagggtcagggtcacccgctcggggggatccatgggcgcatcggccacccccacagcctgcagggtggtggtcgactgcaccgcatagctggggtggttggggaagatcgaggcaatgtggccgtcgtcgcccaactccagcatggtgatgtcgaactgggtgtcgccgatgtccttcgcgtaggcataggcggcatcgtccgggtcggtcttgccggtgcgtgagggcatggcgtggatctgggagggcaccagggtgacggcgccggccaggatgctgagggcctgcacggagttgcgtaccggatcggtggtggtgacgaagcgttcgctggcccaccacagctgcagccgggaggcatcgaaggcaccggtgcgcgccaacgccgcgaagtgggtgagcgccgacagcacggtgggcccgcccgacaggcagaggttcacatattcctgacggcgctgcatctcggccagggccgacaccagcagcgtgccggcacctgtggtcaactcctcgttgtccaggtaacgcagcacgcgcggtgcgctcgtcatgggcggcgccatcatccggctcgctctcccaaccggttgagggcgcgctcataggagtcatcgggtcccagccggcggaactcctcggacaacaggtcgaccacggggcgccggatcagggcagcggtgcgcagcggctggtcgggcacgatgtactcggcatcactgctcttcacgcgacgtacggccacctcgccggcgtcggtgaccaggcgcaccgcggtgatccccgggcccatggacgtgttcaccgtcaccggaacgcccagtcgcacgtcgagccaggcggccatcagcgcggcgggcgcgttgtcctccaccgcctcgacgatcgccgaggtcacggggcgacggcactggtccagcgccgaggccaccagggcccgccaacgcgtgagccgggtccacgacaggtccgtgtcccgggcgctgtgggtgccgcgggcgcgggccaccagggtgccgacggggtcgtcggcgttggtggcgtcggtgatgcgccgatccgccatgcgtccgatcggatcctgtgcggggaactcggtgccgcgtccgggccaccaggccaccaccggcaggtcggggagcagcagggggagcaccacggagtcgccacggcccacgagctcgccggccaggcgcagggtgatgatgtcgccgggcacgccctcgccgacgaggatctcggcgtccatggcggtcttggtcgacttgctgttcaccaccatgaggatcctcgacggatgctccgcggcagtcgcctgggccgaatcgaaggcgcgggtgtactgctgcggggtgctgacgacgatgagcgtcatcaccaggccggacgccagtccggtgctgcgacgggcgttcatggcggcgtcggcaatctccgacgaattcgtattggtgagttcgatgatcatgatcggtctcctacggcctgcgccaggtgaagccatcgtgcttgagcatgtcgatgcccgagttcgggccccaggtacccgacgcatattgctcgggcgggccctgttcggcccagtgctggagcaccggatcgagcaactgccagctgagctccacctcttcctggcgggggaacaggggcggctcaccgagcagcacgtcaaggatgagccgctcgtaggcctcggggatcgactcgttgaacgaatcggcataggcgaagtccatgctcacctggcggatctccatggccgtcgccggcgccttggcgccgaagtgcattgacacgccctcgttgggctggatgcgcatcaccagggcattggtgcccagttcgctggtctcggtgttggtgaagggcaggtggggtgcccgcttgaacaccagtgccacctccgtgacgcgccgcggcatgcgcttggcggcccgtaggtagaacggcacgccggcccagcgccgggtgcccaggtccacccggatggccgcataggtctcggtgtgcgaatcggcggggatgcccttctcctgcaggtatccgggcaccagttgcccaccctgccagccctcggcgtactggccgcgggcggtgtggatgtcgaggttgcgcggagtggtggccgcggcgaggatcttctgcttctcgatcgagatctggttggcctcgaagctgttgggctcctccatggcggtcagcgccatcagctgcagcaggtggttctggatcacgtcacgggccgcgccgatgccgtcgtagtagccggcgcgaccgccgatgccgatgtcctcggccatcgtgatctgcacatggcccacgtagttgttgttccagatcggttcgaacatctggttggcgaagcgcagggccagcaggttctgcaccgtctccttgcccaggtagtggtcaatccggaacaccgactcgggcgggaaggccttcgacaccgcccggtagaggtccttcgcactggccaggtcgtggccgaacggcttctcgatcaccacgcgcttccagccctgcgactggtccaccatgccgaacttctccagctggtcgacgaccacctcgaacatccgcggtggcacggacaggtagaacgcatggttgccgtcggcgccctgcctgttgtcgagctcatcgagggtggaccgcaggcgcttgaaggtgccctcgtcgtcgaagtcaccccacacgaagcggatcccggtgaccaactgcttccaggtctcctcgcggaagggcgtgcgagcattctcgcgcacatcctgcttgacgatctcggcgaactgggcgtcggtgtagtcgcgacgcgccacaccgaccaggccgaaccccggcggcaacaggccacgattggccaggtcgtagacggccggcagcagcttcttgcgtgacaggtcgccgctgacgccgaggaagaccagcgcacaggggcccgcaatgcggggcatgcgacggtcttcgggatcgatcaggggattgacccacggcacgggtggcgtcaggggtgcggactgcgccggcggggtctgcttggatttcgccgagcttcgatgtgtggagttcacgtcctcaccctactaaggcccgctgtttgattgtcctgttggcagttcgccggtcatgtcggcgtcagggaccgggccacgcggctggtcggcccggtggcaggtcggcggggtggcaggtcggcggggtggcacgtcagcggggcaccggatcatgagcaggcccggcggatgatcggcagcacgtggcgcagggtcggggtgtccaccgacccgaaaccgaagacgatgccgtccatcgccggggcatggggcccccagaactgggccaggtcgctgaccagcacgccccgggccgccagccgccgggtgatccgggagcccgggacgttggtgcgcagcacggcctgcagcccgcccgacatgtccgtgagtcgggcgtggggagcatcgcggaaggccgccacgatgagttcccggcggcgccggtactcgcggcgcatccgctggatgtggcgccgcagctcgccactggccaggtagttcgacagggcctgctgtcccagtgccggcaccggggaaccgaagatcgcgcgatggcccgccacgaggggcgcgaggcgttggggcaccgacaggtagccggtggccacggcgggggtcagcaccgtcgagaaggtgcccagcagcaccaccctgccccggaccgggtcgtcgagggtggccagcgcgggcaggggcatgcccacatagcgcagctcggagtcatagtcgtcctccacgacgatggccccggtgcgtgcggcccagccgagcagctgttggcggcgggtgatcgacaacgacccgccataggggtactggtggctcggtgtcaccacgatgacatcaggtgtgggcacatcgggcccgtggctcgtgggggagccggcctcggggagctcctcggtcaccagtccccggtcgtcggtgcgcagcgcgatcgtcggcaggcccatggcggtggggatcgcggccagcgcgggatgcccgggacgttccagtcccaccagcgggggacgctcaccgcggcgggccagcgccgccagcagcagggcgaggccttcgcgtgccccggaggtgaccagcacctggtcggacgggcggaccagcgagcgcatgaggcgcaggtgctcggcgatctcatggcgcagcgagggcagcccgcgggcgtcgatgagtgggcgggggtcgttcgtcgcctcgcgccaggcgcggcgccacggcggcgagacgatggccgatacatccggggtgcccgggcgcaggtcaatggcccggccgtcgggttggggtgcgggaggcgccggcgcggacgggcctgccaccggccggcgggcgtccactgcggccacgcgggtgcccgagccaggcctggaggtgagatatccctcggcctggagctggtcgtaggccgcgaccaccgtcccccgcgcgacggacaggctcgcggccagcgcccgcgtcgagggcaactcgtcgtcgtggtgcagccgcccctggtcgatcaacccgcgcagcccgaccaccaattgggccgtcaggccgaggtcgccggaggtgtccaggtgcaggggaaggtcgatcacgagttgaccgcgcatggggcaagtcttgcaccgtccggtgaaagtggtccattcgaactggctgcatgtggatcttgtaatggtccgcttgtcgcggtggaatggcgtccatgacacaagagacgacagccaccacccgcgtgaagcgcggcctcgccgacatgctcaagggcggtgtgatcatggacgtggtcaccgccgagcaggccaggatcgccgaggaggccggcgccagcgccgtgatggccctggaacgcgtacccgccgacatccgtgcgcagggcggcgtggcccgcatgagcgatcccggactgatcgagcagatccaggccgccgtctcgatccccgtgatggccaaggcgcgcatcggccacttcgtcgaggcccaggtgctgcaggccctcaacgtggactatgtggacgagtccgaggtgctgtcgcccgctgactacgccaaccacatcgacaagtggaacttcgacgtccccttcgtctgtggtgccaccaacctgggtgaggccctgcggcgcatcaccgagggtgctgcgatgatccgctccaagggcgaggccggcaccggcgacgtctccgaggccgtcaagcacatccgcacgatccgcgatgagatcaaccggctccattccctgacgcacgacgagctgtatgtggccgccaaggaactgcaggcgccctacgacctggtgcgcgaggtggcagagaccggcaagctgccggtggtgctgttcgtggcgggcggagtggcgacgccggccgatgccgcgctcgtgatgcagctgggtgccgaaggggtgttcgtgggttcgggcatcttcaagtcggggaatccggcgaagcgcgccgcagcgatcgtgaaggccaccacgctctatgacgatcccaaggcgatcgcggaggtctcccacgacctcggcgaggccatggtcggcatcaacgtggccgatctgccggcaccccaccacctggccgaccggggctggtgagccgatggctgattccccagtagtgaccggggccccactgatcggggtcgtctccctccagggcggggtctctgaacatgtcgccgccctccagcagtgcggggcgcgcactcgcctcgtgcgccgctccgaggagctcgggggactggacggcatcgtcgtgcccggtggggagtcgagcgtgctcgacaagctgtcgcgggccttcggcctggccgcacccctgaaggcggccgtggctggtgggcttcccacgctggccacgtgtgccggactgctgctcctcagcgacgagctgaccgatgcggcgcccgggcaacagaccctccaggtgctgcgcgtgcgtgcccgacgcaatgccttcggacgccagctggcgtccttcgagacttcattgtcggtgaagggggtcggggaggacgtcgaggccgtgttcatccgtgcaccggtcattgaacaggtcggcgccggcgtcgaggtgatcgcgcaggtcgacgaccgggtcgtcggcgtgcgacagggagccatcacggcgcttgccttccatccggaactcaccccggatcggcgcatccacgcggacttcgtgtcctcggtcgcggcacatctgtcgctggctgcctgagacgggggaccagcctccggtcggacccgtcgtcgcaggacatgtcggcttcatcggtacatgggctacatcgggacgtccacacatcgagcaggggcgccaccatcacggtggcgcccctgctcgatgtgtggaccgggcgtgggtcagcgcagggaggtgtgccgttcgatcgaacggacggccagccaggccaccacggcggtgagcacgatcgtcaccggaatgaacccgaggcccagcaggtcggcggacgccccggagtggaacgatccgttgaacagcccgcccagcatgggcgaccagaccacgtggccggcctcgggcccgccgatccgcaggctggccgggatgaggaccatggacgccaggttcgtcagctggttcaccaggtagagcgcgatgagcacgatcaccgagccggcgacgccctggcgcaccaggtgcgggccctggccgatggagatgccggcgacgagctgaacgagcatgcaggccagctccaccacgaccagcgccagcacccacaatccgacatgtggggcgccggtgagcagcttccagaaatcggccatcagtgcggccggggtggtccactcgcgctcccgggcaatcatgagcaccaggaacagcgccacgccctccagcgcggcgaggacgcaggccgcgagggtgaacgtgagcttcgcggcgaacacgacgcgcccccgcaccgggatcgtcccggtgaaatacccgagcctgccgtacatcgtcttccagtacgaccacaggagcaggacggtgaccaccgccggaagggccaccgcgacggcaccggcaatgaagctgaatccgtagtcgggcagcccgagcgccaccccggcgctggccagcagcgagacgagtgccgaggcaccggccacgcccagcagggtgcggcgattgtccagccattcatgcttccacagcttggcgatcatggcaggtacacctttcggaagaggccctcgaggtcggtcttgttggccgcgcgcagctcgtcggcgtcgccctgcaggcgcaggcggccctggtgcaggaagacgacggtgtcgatcacgggttcgaggtcgtggatgagatgggtggagatgaccagcaactggtccggttcgaagtgcttgaggatgccctccatgaggatggaacgcgctgcgggatcgacgccgcccaccggttcgtcgagcaggtagaccttcgcgcgtcgggccatggccagggcaatctgcaccttctcgcgcatgcccttcgacatctccttgagtcgccggtcggtcggcaggcggtagaagtcgatgagatcgtgggcccgatccgcgtcgaaatcggcgaagaagtcggcgtaccggccgatcgcgtcggcgggccgttgccagtcgggcaggaacgactggtcgggcaggaaggagacgaactgcttggtggcggcacccgggggctggccatgcaggctcacctcgccctgccaatcggcggtgactccggccaggaccttgagcagggtggtcttgcccgcgccgttgtcgcccatcaggcccacgatgtggcccggctccaggtcgaggtccagtccgtcgagtgccctcacccggccgtagaccttggtcagtgcatgaacgctgagtgctgtggtcatttctcctccttctggatgtcatcccaacgggaaccgaacagttcgatggccgtgtcgcggtcgagtccgagtccggcaagcacgtcgatggccccgtcgaccgccccggtggccagccggaaccgctgttgggcgacctgctggcggtcggcggtcacgaagcgtccggacgttcgttcggtggcggtgagtcccagccgatcaagctcggacagggcccgctgcacggtgttcgggttcaccccgaactccacggcgagctcgcgcacgctcgggatcttctgccccggagcccattggccggcaaccacgcgggtttgcaggcggtccaccagctggatccacagtggactcgtggtgtcgaagcccataacgcctccctgctgtattagtacaccaatacagtgacacaggagcgatcctgcgtcaaggctcgtgccatggggtgatcgggcgtcgacggcgtcgtggggaaggccgactcgtgctcggaatcgggagggaataggctgtccggggccgtgtgtggccgggcccgacgacggccccggcggccctcggatccggctcggggaaggcgctgggcgaaagcgttttgatccggcgatgatttcggcaacaatggtgttgtgaaaaacatgacggagctcggagcggagcgccccaacggcgacctgtccacccgtcatcaggtgctgcacctgctgctgagcgagggggccatgacggcgcccgacctggcctgtcggctctctatcacgcccaccgcagtgcgccgccacctgacggggctgatcaagggcggccaggtggtcgagaaccagcccgaccagcagccgagtcgggggcgcgggcgcccggccaagaccttccagctgaccgacctggggcgctcggcgttcaaccaggcctatgacgacctggcgatgcaggcgctgcgcgtgctcgtggagacgatgggtgccgacgcggtcaccaagctgggtgagaagcgctacgtcgacgtcgaacagcgctaccgcggctatcgcgccgcgcatccgctggccgatcccgtcgaggcgctggccagcgcactcaacgacgacggctacgtcacgaaggtcgatgaggcccctgccggcgcgcagctgtgccagcaccactgcccggtggcccacgtggccgccgagttcccccaattgtgcgaggccgagacgcagatgttctcgcggctcctcggtacccgcgtccagcggctggcaaccatcgcgcacggcgatggcgtgtgcaccaccaacattccgctggacatcgttgtaatcgaccacgagatggtgatcgaacacacgccacgagaacgcaagcgagcggtagaaaaccaccgagcgacagataacaaccgagaggcaacaagcgcatgacgcagctcgatacagggccagtcggcaccggcccgggatccagccagtccaccgcggaccagctggctgaggacctcaacacctacaagtacggatggcacgattcggatgcctacagtgccgccgccaagcgcggcctgtcggaggacgtcgtccgcggcatctcggcgctgaagcacgaacccgaatggatgctggccaagcgactcaagggcctgaaggacttcgagcgcaagccgatgcccacgtggggggccgacctgtcgcacctcaacttcgaccagatcaagtacttcgtgcggtccgtcgacaagcaggccaccagctgggaggacctgcccgacgacatccgcaagacctacgaccgcctgggcatccccgaggccgagaaggaacgcctcgtcgccggcgtcgcggcgcagtacgaatccgaagtggtgtaccagaagatcaatgatgagctcacccgccagggcgtgatcttcaccgacaccgacaccgcgctgcgcgagcatcccgaactgttcgaggagtacttcggcaccgtcgtgcccagtgccgacaacaagttcgccgcgctgaacaccgcggtgtggagcggtggctcgttcatctacgttcccaagggcgtcaacgtcaacatcccgttgcaggcctacttccgcatgaacaccgagaacctcgggcagttcgagcgcacgctgatcatcgtcgacgaggatgcctatgtgcactacgtcgaggggtgcacggcgccgatctacaagaccgattcgctgcacgcggcgatcgtcgagatcatcgtcaagaagaacgcccgctgccgctacacgaccatccagaactggtcgggcaatgtgtacaacctggtgacccagcgcgccaccgtggccgagggcggccagatggagtgggtcgacggcaacatcggctcgaagatcaacatgaagtaccccgcctgctacctgctcggtgagcacgccaagggcgaggccctgtcgatggcattcgccggtgagggccagcaccaggacacgggggccaagatggtccatgccgcgccctacacgtcgagcacgatcgtctcgaagtcgatcagtcgcaacggcggccgcaccggttaccgcggcctgatcgcggtggagcccaatgcccaccactcggcctcgagcgtcaagtgcgatgccctgctggtcgacgacgtctcgcgctccgacacctatccctatgtggacgtgcagaccgatgacgtctcgatggagcatgaggcgacgatctccaagatcagtgaggaccagctgttctacctgatgcagcgcggcctcaatgaggacgaggcccgcgcgatgatcgtgcgcggcttcgtggagccgatcgcccgcgaactgccgatggaatacgccctggagctcaaccgcctcgttgagctgcagatggaaggctcggtcggctgatgacccacgagaacgagaatggagcaattgctgtggccgaaccggtgaattccggcgctgacgcggtggagagcctcgcgtcccacctgcacccgaaggtctcctgggaccttggggaccatccgatgccgactggtcgggaggaggtgtggcggttcacccccgtgcgcaagctgaaggccctgctggaggctcgcggtgagaagggcgacgtcgaccttgtcgagcgcactcctgccggggtgaccagcgtcgtcatcgacccggtgcgcgcccgtgaactcagcgtggaaccgccggccgaccgcagctcggccattgccgtggcgcagtccgacgaggcgcgcctcatccgcgtgcccgccgacgtcgagctggacgagcccctggaactggacgtgcgcggcaccggggtgggacgtcttgcctaccagcagctgatcatcgaggtcggcacgaatgcccgggcgcagatcgtcttccgcttcgagggcagcgcagcgctggccgagaagatcgacatccgcatcggtgacggtgcccgggtcgacgtgatcatggtgcaggactgggctcccgataccctccacgccgcccaggtctccctgctcgtcggccgtgacgcccatgtgcgcacggtgcaggcatcgttgggtggcgcggtcacccgcgtgctcgaacgtgccagctatgccgcccccggcggcgaactggagcagtacgggctgtacttcgtggacggcggacgccatgttgagcaccgcatgttcatcgaccacaaccagccccgcacccgctcgaacgtcgattaccgcggcgcgatccagggtgagggctcccactcggtgtgggtgggcgatgtgctgatccgcaagatcgcccacgagatcgagacctacgaggcgaacaagaacctgctcctgagccgtggcgcccgcgccgactcgatcccgaacctcgagatcgagaccggcaacatcgtcggggccggacactcgtccaccaccggtcgcttcgacgacgagcagctgttctacctcgagagccgcgggatccccaacgacgaggcacgtcgcctggtcgtccacgggttcttcgtcgacatcgtgcgccacatcggcgtgcccgaggtcgaggaacggctcatgaaggccgtcgagcgcgagctcgattcgatcgcaccggattgggggaccgaccagtgagcttcacagctgtcgcgaccctgtccgacctggacgacggtcccctgggcatcgaggtggaccacccgaccgaaggcgcactgcccgtggtgctcgtgaagtcgcccgacggcgacgtgcacgcgatgttcgacgaatgcagccacgcccacgtcaagctgtccgagggtgacttcgatgaggccacctgcagtctggagtgctatctgcacggctcccatttcgatgtgcgcaccggagcagcgctcaatccgccggcgatccagccggtacccgtctatcccgttcgtgtcgaggacgaccagatcctcgtcgacgtcgagaatcccctgaaggagaactgaaccgatggccacactcgtcatcaaagatctgcacgtcgacgtcgacacggagaacggccccaaggagatcctgaagggggttgacctcaccgtgaacgacggcgaggtgcacgccatcatgggccccaacggctcgggcaagtcgaccctggcctacgccgtcgccggccatccgaagtaccacatcacgcagggcaccgtgaccctcgacggcaccgagttgcaggacctgccggtggacgagcgcgccaaggcgggcctgttcctcggcatgcagtacccggtggaggtgcccggcgtctccatggctaacttcctgcgcactgccaagaccgccctggacgggcacgcacccaaggtgcgcacctggcccaagcaggtcaacaccgcgctggccgagatggacctggactccgagttcagctcgcgctcggtgaacgaggggttctccggcggcgagaagaagcgcggtgagatcgcccagctcgagctgctcgatcccagcttcgccatcctcgacgagatcgactccggcctggacatcgacgccctcaaggtggttgccggtggcatcgatgccttctccaagaagcccggcaaggccgtgctgttgatcacgcactacacgcgcatcctgcgttatgtgcaccctgaccgcgtccatgtcttcgtggacggtcgcgtctcggtcaccggcggctccgagctcgccgacaaccttgaggagcggggttacgagcagtatgtcaagtgatttcgatgtggagacggtgcgccgggatttcccgatcctgagccgccagatcaacgggcatccgctggtctacctggacagttcgaacagctcgcagaagccgcgtacggtgatcgacacggtcgccgagcactacgcgaagcacaatgccaacgtggcccgtgccatgcacacgctcggcgccgaggccaccgcggccttcgagggtgcccgggcgcgcatcgcggacttcatcgcggctgccgaacccgaggaagtcgtgttcaccaagaacgcctcggaatcgctcaacctggcggccaatacgctcggttcgcgcctcggacccggcgacgaggtcgtcatctccgtgctggagcaccactccaacctggtgccctggcagatggtgtgtgagcgcaccggcgccacgctgcgttggttcgacgtcaccgaggagggccgcctcgacctcgacaaggccgagcaggaacacctcatcaatgagcacaccaaggttgtctccattgcctgggtctccaatgtcctgggcacgatcaacccggtggccaggatcgcggagatggcccatgccgtcgacgcggtgatggtgatcgatggttcgcagggagtgccacacctgcccaccgacgtgacggcgctgggaggcgacctgctggccttcaccgggcacaagatgttgggtcccaccggcatcggcgtgctgtggggtcgccgtgagctgctcgacgagctgccgcccttcctgggtggcggcgagatgatcggcgtggtcaccatggagaagtccacctgggccgaggttccccacaagttcgaggccggcaccccgccgatcgcgcaggccgtgggcctgggcgctgccgtcgattacctcgacaccctgggcatggacgccatcgccgcacacgaccacgagatcaccagctatgccctcggcctgcttggcgatcttgatttcgtgcgtatcctcggcccgaagcaggctgttgaccgtggcagcgccatctcgttcacggtcgacggcgtgcacccgcacgacctcatgcagctgctcgactcgcgtggcgttgccgtgcggggtggccaccattgcgccgccccgctccatcagcgcttctgcgtgcagagctccactcgggcctcgtcgtacctctacacgacgcgcgaggaaatagatgcgctgcgtgatgggttggtatgggcgcatgatttcttcactggaaaggtgaaagcgcgtcaatgaacgtcgaggagatgtaccaggacatcatcctggatcactaccgggagaagcatcacaccggcctgcgcgacccctatgaggccgaggtgcaccatgtgaacccgagctgtggtgacgagctgacgctgcgcgtggatctcgacggcgacaccatcgccgacgtcagctacgccggcgagggctgctcgatctcgcaggcctccacgtcggtgatgactgacctggtgatcgggcactcggtggcgcatgccatggagttgttcgacgagttcaggacgatgatggaaagccagggcaggatcgagcccaatgaggatcaccttgaggacggcatcgcctttgccggcgtctcggagttcccggcgcgcgtcaagtgcgccatgttgagctggtcggcattgcgtgacgcattggcccgggccggagcttcaattgaggaggaaaaatgagcgtgcctgacagcgaccagatgtcgccgacacccgcccagaccgagaccgggcaggcccagcccgagcagtccaccgctgccgcggcccgtccgtcggacctggtgcgcgatgagctgccggaggtgtccaccacgccgaccgacccgaacctgaaaccgcccaccgaggagcaggtgctcgaggcgctcagggaggtcgtcgacccggaactgatggtcaacatcgtggacctgggcctggtctacggcgtggacatcgacgagcacgccaatgtgctgctcgacatgacgctgaccagtcccacctgtcctctgaccgatcagttggaatggggagcccaggcggccctcgacggcatcgccaatgaggtgaccatcaactgggtctggctgccgccgtggagcctggaccgcatcaccgacgatggccgtgaacaactgcgctacatcggtttcaacgtctgatccccaccggccggacacccgtccgaccgcgccgggagcccaccgacgaggtggcacgcaatgatgcccgcaccatccgatggtgcgggcatcattgcgtggacagccccaccggtgagggtggctttttgcccaaatggccctcagcgcagacaatggacgacggcccggccgtcatcgcgcggccaccgacgaccagccgcacccccatcggggcgccgtgatcgccgatcgtccccggcagcgggccgcccccgatccttcaggagaaatgtgattcaggccaaggagctcgaagttcgcgccggcgcgcggctgctgctcaacccggtgagcttccaggtgatccccggggacaagatcggcgtggtcggccgtaacggtgccggcaagaccaccaccatgcgcatcctggcgggggagggcctgccggccgccggcgcggtcaagcgtgccggccaggtgggctacctgccccaggatccgcgcgagtcagacctgtcgatcaccgcatcgaagcgcatcctgtcggcgcgtggactggaccgcatcatggagcgcctcacgaagttcaccgaggagatgtccaccgccagcggtgcggctcgtgagaaggcgatggccggctacgaccgtgccgaggcccagctgaccgccgccggcgggtacggggccgaggcggaggcggcgcgcatcgccgcgaacctggggctccccgatcgagtgctggcccagccgctgcacgagctctccggtggccagcgccgacgtgtggagctgtcccgcatcctgttcagcaatgccgacaccctgctgctcgacgagccgaccaaccacctcgacgccgactccatcatgtggctgcgtgaattcctcaagacctaccccggcggtgtcatgatgatcagccacgccaccgagctgctggaggagaccgtcaacaaggtcttctacctcgacgccaaccgggccaccctcgacatctattcgatgggctggaagctgtacctcgaacagcgccaggccgacgagaagcgtcgccgccgcgagcgcctcaatgccgaacgcaaggccgcccagctgatggcccagtcggacaagttgcatgccaaggccaccaaggccgttgccgcccagaacatggcacggcgtgctgagcgcctactggcgtccgtcgagccggagcgggtcagtgacaaggtggcgaagatcaccttccccgagcccgcaccctgcggcaagacgccactcatggcgaaggacctgtcgaagagctacggctcgctggaggtgttcaccggggttgacctggcgatcgaccggggcagccgcgtcgtggtgctggggctcaacggtgccggcaagacgaccctgctcaagatcctcgatggcatcgagaagcccgacaccggcgaggtgctggacggatacggcctcaagctgggctatttcgcccaggagcacgacatgctcgacatgtcggccacggtgctggagaacatgcaggccgcggcccctgagctcaacgacacggatgcccgcaaggtgctgggtgcgttcctgttcaccggggacgacgaccagaagccggcccatgtgttgtcgggcggggagaagacgcggttggcgctggcgaccctggtggtcagtgcggccaatgtgctgctgctcgatgagccgacgaacaacctcgaccccgcgagccgcgagcaggtgctcggtgcgatccgcagctacaagggcgccatcgtgctggtcacccacgatgagggtgccgtggaggccctcgaacccgatcgcgtgctgctgttgcccgacggtgacgaggacctgtgggatcacgagtacaccgagctggtgtcgctggcgtgatcccatgccacccggggcctgccccgggtggatcgcgctgagcgcttcctacgcgccagcgcgcagacggtgcccatgcttcctacgcgcctgcgcgcagacggtgcccatgcttcttacgtgccagcgcgtagacggtgtccatgcttcctacgcgccagcgcgtaagaaggtacccacctccaccgatacgtcgatggtggtggggccctgcgccggcgcatggtcatggaaggcgttggggcccatgcccaccaggtccgcgacctgctgggcggtgcattcggcggagaactccaccaactcgcggtcggcggggttcagccctgcctcgccgaactgggtgaccaactgctcgtccttgtcggtggccacgttcagcagcccgaggcgctcgcgcagcgctgccaggtggcgcggcgtgggccaggcgacgacggcacgcccgcccggcgcgagcacccgggcgaactctgcggcactgcggggggcaaagacgcacaggaccgcatccacgctcgccgatcggatcggcaggcccgcccaggtgtcggccaccacggaggcgaggccggagcgggccgcccgcttggcggcggccacggacacatccgtggccagtccgacggcatcgcggcgatgggtgagcactccgtccaggtaccagccggtaccggcgccgacctcgaccagccagtgtgccgcatcactggcgtgcgagaccgcctgtcggatgggctcgtagacaccgctgtcgaggaagcgttggcgcgcgtcgatcatcggcgccgtatcggcattcgccggtggggcgccgccggccaggttcacatatccctggcgcgcgatgtcgaagccgtggccattgggacacgccagctgccggtcgtggcggaccaggggcacctcggcggccccccggccgcggcacacggggcactccagcaggggacaggcggcgtcgagcgcgctgaaatcagtcacggacgcgtcacagcacctggagcaggccgccgtcgaccggcagcatgaccccggtgacatagctggccgcatcactgagcatgaaggccgccacgcgcccgaattcgtcgggatcgcccatccgacgcatcgggatgccagaatccaccgcgtcctggggcgtcgggtcatggcccaacaggtcgaccatccgctgggtggcgatgcgtccgggcaacagggcaaatgcgcgaccaccatccggggcgatctcattggccaactgcttgaccagcatcgccagccccggccgcaggccattgctgatggccatgtcggccagcggggacttcgccgaactcgacaacacgaaccccaggcgggcagccggattcgcgcccaccacggcacgcgacaccctcagcgccgccaggaagaccgacgagaacgcggcctgccactgctcatcggtgttctccaccacatggcccttgggcgggccaccgaccgacacgaaggcgccatcgaggcgctgccaggtgtccagggccagttgggcggcggcatcggcggtttccggcgccgacaggtcggcgggcagcaccaccgcattctgcgcgcccagctcggccgcggcggccgccagggcctccgcacgacgggccaccaacaccacccgtgcgccctcggcgaccagcgcgcgagcgctggccagcccgaggccaccgctggccgccgtgacaatgaacacctttgaggcaagacccagatccatgggttcattctgcccgactccggcgacgacggtggcgtcggcacccgtcgcaaccgataccgttgccccgtgactgcaactgatcccaccaccattcctgccggcagggtggccctggtcaccggggccagccggggcatcggagccgagatcgccaccgagctgctggctgccggctatcgcgtcgccggcacctcgcgcagcggccgggccccggacggggtgctcggcgtgagtgctgacatcaccgatcccgagcaggttgaggcggcattcgcgcgggtcgaggaggaactgggcggcgtcgaggtcctggtggccaacgccggcatcacccgtgacatgttgctgatgcgcatgagcgatgacgactgggatggcgtgctcgccaccaacctcaccggcaccttccgcatggtccgtcgggcaacccgcaggatgatgcgggcgcgtttcgggcgcatcgtgttgatgagctccgtctcggcctatgtcgggtcaccgggacaggtcaactactcggcgtcgaaggccggactgatcggcatggcgcggtcggttgcccgtgagctcggcggccgcggcatcacctgcaatgtggtggcccccggcttcatctccaccgacatgaccgacgagctgtccgatgaggtgaaggacgactacctggcacgcatccccgccaagcgcttcggcgagacccgcgacgtggcccacgcggtccgcttcctgtgctcggacgccgcgggctatgtcaccggggcagtgctgccggtcgacggcggcctgggcatggggcgctgatccaccaccgggtgcggcgccgccctgtgcgcgacgtgtggcggggctggtcccgataggctcggggaagctgacgaaaggacttttcaatgggcattctcgatggcaagaacatcctcgtgaccggcgtcacgatgaacacctcgattgcgtacaaggtggccgaggtcgccgagcagcagggcgccacggtgatcgtgaccgcgttcgggcgggcgctgcgcctggccaccaaggtggtgcagaagctcgatccggtaccgcaggtcatcgagctcgacgcctcgaatgccgacgagctggcggcgctgcccggcaagctgcgtgaactcggcttcgaccacgtcgacggtgtgctgcactcgattgccttcgccaatcccgagcgggccctgggcggcgcattcctcaagaccggctgggacgatgtcgcggtcagcctccacacgtccacctacagctatgtctcgctggccatggcggtgcgcgagctgatgtcggccggatcatcggtcgtgggcctcaccttcgacgcctcggtcagctggccgtcctatgactggatgggcgtggcgaaggccggcctcgagtcggcgaaccgttacctcgcgcgctacctcggccctgaccagatcagctccaacctggtggctgccgggccgattgattccattgcgaagaccgccatcccgggcgccaactcgttcaatgacatctggaccgagcgtgcaccgctgggatgggacgccaaggacgccaccccggtggccaacgccgtgtgtgcgttgttcagtgacctgttcaccgccacgaccggcgagatcatccatgtcgatggcggcctggcctccaccggcgcctgatcggtcgaccaccactcgtccatgccccctgcccggcccgggtcagggggcatcgtcgtgcccggcggggggcgtcagagtccgtgtggtgcccggggccagctggcggcggcgctgatggcatcgcggcagatgtcgtccagctcgcgcaactgcttgtcgcgcaccagcaccccgtggctgtgcagcagttgcgggctggcctcgatgccggcccggctcgcctcgcgccacagcagggcgcggtcgagcagtttctggttgacgtgcgagtaggcagcccccaggtggattgaggccgcgtcgtcgggacggttgcccgccggcgcatcgaggcgcccgagttcccgcccggcggccaggatctgctcattgagtgcctgtgcggcctcgcccggcgtcgcggggagcagggggcgttcggccggcacgagttcccactgcatggccgggcccaccgggcgcggcagccatcccagcccaccgccgtggttcaccacgatcaccccggtctccagggcggcagcgttggtcgcgatcggaccgcgcagcccggcgagccgtccgggttggggcagcaggagggcccagtgctcgcccggcagctggttcgcgacccggcccagggcgatgcgcaccggggtggccacctgcggctccaggccgagcacgcccgccgggtcgaagacatggtgggcgcggttggggtcgccgttgtcggccacgcgcagggcatcctcggcgcgggcggcgtccagcccatcaccggtcatcgcattgagcacgctgaccaggcgcaggccttcgatcaaggagtcagacacgccgcaaggttaaccatgcgcgcaacccgccgggtgggcatggcccacggcgcgcccacgggttgccaccgtgctgttcgcgcgcagtgatcgccggcgtgcgcggcttgtcccgcctgcgccgggcgcgggcaccttgtatgtttctagtcatggtcgaggtggcgaagctttccggggttggcgtgcgacgtggcaaggcgaagctgctcgacgatgtgaacctcacgatcaatgagggcgaccgttgggtggtgatgggccccaacggtgccggcaagacgacgctgctgtcgctgctgtccgcccagaaccatccctccgaggggaccgtcgaactgctcggcgagcggatgggccggatcgatgtcttcgagttgaggccccgtatcgggctgagcagttcgtcgctggccgagcgcattccgcgcaacgagaccgttgagaacgtggtggtgtccgcctcctatgccgtggtgggacgctggcgtgagcagtatgacgagctcgacttccagcgtgcccacgagttgatgaggttgttcgccgtcgaggggctggcacagcgcaccttcggcaccctcagcgagggggagcgcaagcgggtggagatcgcccgcgcgctgatgaccgacccggaactgctcctgttggacgagcccggcgcgggactcgacctgggtggccgtgaacacctggtggccaccttgtccatgctgtgccaggatcccgattccccggccatcgtcctggtcgcccaccacgtcgagcaggtgccggtgggcatcacccatgcactgttgctcgaccatggccacgtggtggcccaggggccgatcaaccaggtgttcaccgacgagatcatgtcggccaccttcggcctgccgctccagatcaaccagcttcccgacggacgctgggcggcgcgcgccaggctgaactactgaggcgcgatcgcccgtcgcgacgccaaccggcgccctgtgatcccgggccaatcggacggccggggccctgcgaccacgagctcaatcctcggcgggctcgggtcccacgccccgcccgggggcctcatgccatgcctcgtccttgcgcgcataccgcccggcgatcaccccgcaggcgatcaactgcaccatgtggaagatcatcagcggcaacaccaacagcggcacgatcgacggggcgaacaacaccgaggccatcggcacgccggtggcgagagacttcttggtgccgcagaactgaatcgcgatctggtccttgcggttgaagccgaggcggccgggcaaccaccaggtgaaccacagcatgaaggccaggatcgcgaacaggatcggcagcaggcgcccgatgtcggccaacgcgaccgtgtgccagatcccctcgttcatgccgtcggagaaggcgttgtagaccaccgtgatgatgctgagctggtcgacgtacttcagccggggatggcccagcacgaaacccgccgtccaccggcgggtgagctggcccagcacgaagggcaacagcaactgcacgcacaggtcaaggatcgactgggcatggatcaccaggccgccggtgctcatcacgaacatcgccagcagcggggtgaggatcacgcccaggatgttcgatgccgaggcggacacgatggcgccggccacgttgccgcgggcgatggaggtgaagttgatggagctctgcacggtggagggcaggatcgacagccacagcaccccggccaccagggccggcgtcagcacgtgggtcaggatcgggtggatcgcaaagaccacgagcgggaacacggcgaaggtgaacgccaggatcagcaggtgcaaccgccagtgcttcaggcccgccatggcctcgcgcggttccaggcgcaccccgtacaggtagaacaggatgaagatgagcaccttggtggcaccatcgagcacgacgctgccaccaccgcgcaccgggaagatcgaggccatgatggccgagatgcagatggcggtgacgaaccagtcgatgcggatgcgacggaaccagggcttgcccggcccgcgctgctcatgcctgctcacgggcacattctagggagatcggccctgccgtggcccggtccggcgcatcggcccgggaaccccctggccgcggaggtcgatgggggccgttcatccgtggcgtcgcggcgcccggtgtgtggcgcgactagccttaccgggtggccacgctgatccagatcgatgacgcccatgacgagcgcctgggtgatttcgtcagattgcgggacgtgaacctgcgcaagtccctggaggccgagcacgggttgttcattgccgagggcgacaagatcatccatcgggccgctcaggccggctaccagccgcggtccttcctcctggcgccgcgctggatcgacgggctgcgcgatgtgctggatgccaccgatgcgccggtctacgtggtgagtgaggacctggccgaacagatcaccggcttccacgtgcatcgcggcgcgctggcctcgttcaagcggatcatcgcctggtcgatgcacgacctgctggccatggatcggctggtcgtgtgcgaggacatcgtggaccacaccaacgtgggggcgatcatccgctgtgcagcgggtctggggtgggacggggtcctgctcgcgcccagggctgccgatccgctctaccgacgcgccatcaagaccagcatggggtcggtgttctcgatgctttgggcgcgcatggacgactggcgggacggtctggccaccctgcaacgggccggcttcacggtggccgccctggccctgcgtgacgacgccgtggggctcgacgagttcgccgtccggatgcgcgcccggcccgggaagctggcgatcctgatgggtactgagggtgccggcctgtccgggcactggatcagccaggccgatgccgcagtacgcatccccatggcacacggcatcgactcgctcaatgtcgcggcagcggccgcggtcgcctgctacgcgctgcgcccctgaacgtcgcggcgcacgggcgatgccgcgatcgggtcattcagtgggagtgaccggctcggtcggcacctgactgggagcgatcttcgggtgcaccggccagtcggcgggatacagcggggcgagctcttccttctcctggtccagccggcgtcgcgcccgcttcgagagtcggtcgccgaagacggtgccgtgcaggtgatcggtttcatgctgcaggcagcgtgccaacaatcccgttccctcaacgcgcaccggggcccccgtctcgtcctggccctcacagacggcgaagtccgggcgtgccaacgactggtaggcacccggccaggacaggcaaccctcctgcgccgacaccaggtggcggtccttgccctccggcagggtgacgacgggattgcacatcacgccgtagacgagcttgtcgtggatatcggggcagttgaagacgaacagggccaggtcgctgtccacctgcggggcggccaggcccacgccatcggcagcggccatcgtcttgaacatgtccgcgatcagctgcgccaaggtgtcgtcgaaagtggtcaccggacgcgtctggctccgcatgatcgactcatcccagcgggtgattcgcagcaccttgccattgactgcccactcggccgggctcttcatagtctctcctcgtagctcttgctcatcgccgctgatcgcgaccgccgtccccggatcgtccacgggatcctgtggaccaccgcgggtcgatccgatcggccggcgcgggacactcccggcgcaccagcaacaatttatactcaaccagatggatgacgcgggaaggatgccgaccggatgggtccgggacgccggcctgttcgccgactacctgcgcctccaacgtcgtcgctcggccaacaccgaacgggcctatctcaccgacctcagggagctggcgctgttcctgcagggcaggggagtccacgatccggatcacgtgcgactcacggacctgcgccgctggttggcctcccagcaggcgagcgaggcccctgccacggtggcgcgccgcgccggcaccgcccgggtcttcttcggctgggcccgcgagaccggccgcctcggcaccgaccccgccgccggactgcgttcccccaagctgggacgtcgcctgccccagaccctcacccagaccgaggtgcgtgagctgatggacgcggcggctgccgccgctgccgaggccggtggggtccgtggcctgcgcgatgtcgccatcctcgagacgctgtacggctcgggcctgcgggtcagcgagctgtgtggcctcgatgtgggcgacctcgacgaggcccggggcctggtgcgggtgatcggaaagggggacaaggagcggatcgtgccgctggggctgcccggactcagggccatcgacgcctggcgcgcggtacgcgaccagtgggtcgcacccgcatcggccaatgcgctgttcctgggcacgcggggagggcgcatcaaccagcgggtcgtgcgccgggtggtgcatgagtcgatgcgtgcggttcccgaggcccccgatatcggaccccacggattgcgccacgccatggccacccacctgctcgaggggggagccgacctgcgcagcgtgcaggagatgctgggccatgcctcgctgagcaccacgcagatctacacccatgtgagcgacgaacgagttcgtgcggcgtacgagcaggcctttccccgggcctgatgccccgctggccgcggggcccgatagccatcgtcgggcccacctacaggaatggacgcggatccaccgcgcgtccggccgtataggtcgagaagtgcaggtggcaaccggtggacagtccggtggtgcccaccagcccgatcacctggcccgcctgcacccggtccccgacccgcaccaggcccacacccgcatcggccatgtggttgtaggagctggccgccgccgcgtggggttgcccgccgtggtcgatctcaacccggttcccgaacccgctcatcaccgaggaatagcgcaccgtgcccgcccaggcggccctcaccggtgcgccacagggggcaccgatatcgagcccatcgtgcacctcggtggtgccgagcaccggattggtccgtgacccgaacggcgaggtgagtgggccatcggccggcatcaccgcggttccggagggactcaggatctggacccccgcctccatcagcccggaccagccttcaggaaccgggcgcttcaccgtcgtgccgccggccagcagcctcacccggccctccgcacgccccgacagccattccatcgggtccaggtattccttgccgcgcaacagcccccaatgcaggctcgtggtggggccatggcccgacagcagcgtgccgatcacctgtcccaccgccacgcgctcacccttgcgtacctgcggatccacgggctggtaggtggtgcgcaggccatccgcatgggtcaccgacacggtccgcacgccggcgatcgtgccgacatgactgatcgtgcccgcggcggccgcacgcaccggggttccctcgctggctgacaggtcaactcctcgatggcccgctgaccaggccttgtccggcgcccggaaatcgcggctcacgggaccatcgagcggtagcagctgacgcagttcgccgtcgacctgttgggcccaggcccccaccgggcacatcagcgccaggcatgtcagcaggcagacgagcagggtgcgcaccgcagcccggggggccccgagcgggtggcccgcgcaggcacggcgtcgcatcccggtgatccgtagggcccgggcctgctccacggtgcgggtggaggggccgccgcggccagcggggtcacgatgccgccccgaacggtgccgtccctcatggtgctcggtagagagctcgtcgagggagcggtaatcggctgagcggcggtcggcagatgagtggtccatgcctgcaccgtggttgccgcgccgtggaaataccggtgccgggggaattgtggataactgcctgcgggtggcgccaccgtgtgcatccgggtggcagtttggtgactttgtcgacgcacccataaactggtgggagcagtccgcgtccgcgggctgacttcgcatgcgcgcaggcggtccctcatcgcaggggtcgtgcgtcgtggcgcggtccccgatccgtcggggtgccacggggagcgcgcatcaggggcatcggttcgccgatgccggtaaccatgaaaggaacgaccatggccgtcgttactacgcgtcagctgctcgagagcggtgtccacttcggacaccagacccgccgttggaatccgaagatgaagcgcttcatcttcaacgagcgcaatggcatctacatcattgaccttcgtcagtcgctcacctacatcgacaaggcctacgccttcgtcaaggacaccgtcgccaagggcggccaggtgctgttcgtgggcacgaagaagcaggcccaggaggccgtcgtcgagcaggccagccgtgtcggcatgccctacgtcgatcagcgttggctgggcggaatgctcaccaacttccagaccatcagcaagcgcatcgcgcggctgaaggaacttgaggccatggacctcgagaccgtccagcccggtggattcaccaagaaggaactcctcggcttctcgcgcgagaagaccaagctggagaagtcgctgggtggtatccgcgacatggccaaggtcccgcaggccgtctggatcattgacaccaacaaggaacacctggccgtcgacgaggcgcgcaagctgcacatcccggtggtcgccatcctggacaccaactgtgaccccgatgaggtcgactacccgattccgggcaatgacgacgccattcgctcggttgcgctgctcacccgcatcatcgccgacgcctgcgccgagggactcgtggcccgccaggccaagaaccaggccgacggcaccgagggtgccgccgccgagccgatggccgagtgggagaaggaactgctggagtcgggcgaaaaggccgagaagaccgagcagaccgacgagcaggccggcgagctcaacgccgaggtgaccgatgcggtgcaggccgaggacgccaaggaggccgagaaggccgccgaggcccccaagcccgccgcggcgacgcccgcccctgaggcccccaagcctgccgaggccgcccccgccaccgaggaaaagcccgcccaggccaactgagcaaccagtcatcgacatcaccaggaacggatgtacatatggcaatcaaagccactgatgtgaagaagctgcgcgacgccaccggcgccggcatgatggacgccaagaaggcgctcaccgaggccgagggcgacttcgagaaggccaccgagctgctccgcgtgagcggtgcggccaaggccgcgaagcgctccgatcgtgaggccgccaacggcctggtcgctgccgccggcaacgcgctgatccagctcgcctccgagaccgacttcgtggcgaagaacgccgagttcatcgcgctgggcgaccagatcgccaaggccgttgacgaggccgccgccgccagcctcgatgaggccctggccatcacgctgcccgatggccgcacgatccagcaggccgtggccgacatggccgccaagatcggcgagaagatcgaactcgcccacgcggcgtacgtgcccggcacgatcgacgtctacctgcaccgccgcgatcccgacctgcccccgcaggttggcgtcattgtcgcggtggagggtgacgacgaggacttcgtgcactcggtcgcgctccagatcgcctcgatgaacccgagctacctttcccccgaggacgtccccgccgacatcgtcgagcgcgagcgtcgcattgccgaggagacggcccaggaagagggcaagcccgagaagatcattccccgtatcgtcgaagggcgcctgaagtccttctacaaggaggagtgcctgctcgagcagcccgaaatcaacgatgagaagaagaccgttggtcagctggccaaggagcacggcgtgaagatcctggcgttcgagcggttcgccaccggcgcctgagcaggcctgatcgatcgggcccgcccgatcgcccggctttaatcactgacaagaccccttccggaaaaccgggaggggtcttgtcagtgggcccgtccggcaggcgcgcccgggcccgctgccggtagagtgtcgtgtgcacgactgtgcggtgcccaaccaggaggacgacgtggccgaaccattccatcgcgtattgctcaagctctcgggcgaggcattcggcaatggaggtctgggcgtcgaccccgtgaccgtcaatgcgattgccaagcagatcgtcaaggtcaccgaagccggcacccaggtggccatcgtggtcggcggtgggaactacttccgcggtgttgagctgcagaagggcggcatggaccgcgatcgcgccgactacatgggcatgctcggcaccgtgatgaattcgctggccctccaggacttctgcgagaaggagggagtggccacacgggtgcagaccgccatcacgatggggcaggtcgccgagccctatattccgcgccgcgccgagcgccacctcgaaaagggacgggtcgtcatcttcggggccggatccggaatgccctatttctccaccgacaccgtcgccgcccagcgcgcgctggagatcggcgccgaggtcctgctgatggccaagaacggtgtcgaaggggtgtacgactcagatccccgcacgaaccccgatgcgcacctctacgacgacttgtcctacgacgagttcctggccaaggacctcaaggtggccgacgccactgcggtcagcctggcccgcgacaaccagctgaacatgatcttcttcaacatggacgaccccgacaacatcatgagggccgtgcggggggagaagatcggcacgctcgtgcattactgacacgccaccatgggccctgtgtcccatggagtgcggccatcagccatattcgttgttctcaagggagtagaagtgacaagcgacatcatcaagagcgccgagaagaagatgcagggggccatcgacttcgccaaggaggacttctccggcgtgcgcaccggccgggcgaacccggcgatgttcgaaaagctcgaggccgagtactacggcgtccccaccccgatccagcagctggccagtttcagctcgcccgacccgcgcaccatgctcatcaccccctacgacaagggggcactgggagccatcgagaaggcggtgcgcgactccgatctgggcgtcaatccggccagtgacggcaatgccatccgcgccgtgctgcccgagctcaccgaggagcgccgcaaggaatacatcaagatcgtgcgcaccaaggccgaggacgccaagatcgccattcgcgggcaccgtcgccgcgggatggacgccatcaaggcccaggagaaggacaaggagatcggcgaggacgacgcgcgcgtctccgagaagcagctggacgcggtgaccaagaagtacaccgagttggtcgacgagctgctcaaggccaaagaggccgaattgctggctgtctgaggtagacggtgtcggcggccaagcgcagccccgggcgcaatctgccggcggccatcaccaccggggtgatcctcggtgcggtggtcgtcgccaccctgctgtggtggaactggggcttcgccctgttcgtggcgctcgcgctggccctgggcgtctgggaggtctgcaacgccctcgagaagctggacatgcacccggcgcgctggcccattctggtgggcacgcccatcgtgatgattggctcctatgccgtgggtcaggggtccggcgaaccggagagcgccctgggattcatcgtgggcgggcttgcgctcatggtcatcgtcgccctgttctggcgcattccccgcggcacgcaggacttcgtgcgcgacgcagcggcaagcctgttcgtcatcggctatctgccgctgctgggctccacggtggccctcatgttggcgggcagcagcggggtggcacgcatcttctgcttcctgttggcacccatcgcgtccgacaccggtgcctatgtggtcggggtgttgttcggcaagcacaagatggcgcccaggatctccccggccaagagctgggagggcttcgccggaggcatcgtgacagccatggtgctgtgcgcgctggccgtgcacggattgctgcacgccccggcctgggtgggcctgctgctgggcctggtcgcgggctgctgcggcgtcgtgggcgatctggtcgaatcggcgatcaagcgcgatgccggcatcaaggacatgagtcatgtgctgcccggccacggtggcgtcatggatcggctcgactctctgctcgctgccgcgcccgccgcttggctcgtgatgtacgttttgatcgtgtgagtactgtgcagagcgcccgaaccattgacgagatcatgtcgaccggtccggggcgacgtccccccaagcactggatggacctgggcgtcgatgagcgcatcgaggcggtcagggcactcggactgccggccttccgcgccaagcagatttccacgcattggttcagcaggtgcgagcacgacccgcgccagtggactgacctgccggctgccgtccgcgacgaggtcgccgacaaattgttcccccagctcctcaccccggtgcaggcattgagcgccgaccacgggcgcaccgtcaaggtcgcctggcagctgcacgatggttcgttggtcgaatcggtgctgatgcgctatccgcaccgcaccacgatctgcatcagttcggaggcgggctgcgcgatgaattgccccttctgtgccaccggccagggcggcctgcagcgcaacctgtccaccgccgagatcgtcgggcaggtactggatggcgcccgtcgcctcgcgaacggggagattccggggggccccggacgcatcaacaatgtcgtgttcatggggatgggggagcccatggcgaacttcaaggccgtgctgggcgcagtccgcgagatcacgcgccccgagcccgatgggctgggcatctcggcgcgcggggtcaccgtgtccaccattgggatggttccgcgcatcaatgagctgtccgacaccgggatcccggcgaccctggccatttccctgcacgcccccgacgatgagctgcgcgacgagctcgtgccgctcaacaagcacttcaacatcgatgccttgctggacgcggcctgggcctatgccgagaacaccaagcggcgcgtgtccatcgaatatgccctcatcaaggacatcaacgaccagtcctggcgtgccgacctgctggcgcgccgcctcaaggaacgcggcgactggggctggtgccatgtcaacctcattccgctgaatcccaccccgggatcgaagtggacggcctcccggcgtgaggacgaggaggccttcgtcaggcacctggagaaccatcacgtgcccgtgacggtccgcgacacccgcggccgcgagatcgacggggcctgtggtcagttggccgccgccgtcaaggcgcgctgagcatccggggagccgtggcggcaggcccgccacaccggccgcaccgcgtttgggcaccgcccgatgggcgatgggccataatcggcgtgtgcgtgatgttgtgcttcttggcagtaccggatcgatcggaacgcagacctgtgaggtgatcgacccccgccgcgacagtttccggatcaccggattgtcggcgggtggtgcccacgtggcgctgttggcccagcaggccgtccagttcgaggtgccggtcgtgggaatcgccgaggcgggccacgaggaggagttctggcatgccttcgaggcagccgggggaacgcgtcgcccgaagttgatctccggcgaatcggccaaccaggaactcgcggcgatgaagaccgacgtggtgctcaatgcgatcacgggggcggccggactgcatgccacgctcaccacgctggaagccggcacgaccctggccctggccaacaaggaatcgttggtgatcggcgggacgctcgtcacgcaggcggcccggcccggccagctcgtcgccgtcgactccgagcattccgcctttgcgcaatgcctgcgtgggggaggttcccgggaggtccgtagcctgatgctcaccgcgtccggcgggcccttccgtggacgcacccgcgacgagctgcgcagcgtgacccccgagcaggccctggcccatcccacctggcacatgggcagggtgatcaccatcaactcggccacgctggtcaacaagggcctcgagctcatcgaggcggcgctgctgtacgacgtcgactatgacgcgatcaacgtggtggtccatccccagtcgatggtgcactccggtgtggagttcttcgacggcgccaccatcatgcaggcctcgccccccgatatgcgcctgcccatcgggcttgcgctcacctggccggcccgcatgaaggatgctgccctgggttgcgactggaccagggctgcccagtggagcttcgagccattggacaccgacaccttcccggcccctgagatggcacggcgcgcaggcaaggccggcggcacggccccggcagtgttcaatggcgccaacgaggtgtgcgtcgaggccttcctcagcgggctcatcggcttcctggacatcaccgacaacatcgccaaggtgctccacgagcaccatgcgaaacctcgcatcggggaattgagcgtgcaggacgtcctggctgccgacgcctgggcgcgcgacagggcacgtgcctactgcggcgtcaacgacgcctgatcacccggcccgccggtaccggcccgggcgccgaccccggtccgcagccgggggacgactattcttgaatccatggctgacagcggcatgaccaaccaggcgacggactccggggagttcacgcgtccccccaccggggtgctcgctccccgacgcaggacccgcaagattcgcgttggcaaggtcttcatcggtggcgacgccccgatctcggtgcagtccatgaccaatacgctcaccgccgatgtcaatgccacgctgcagcagatcgccaagctcaccgcggcgggatgcgacatcgtgcgcgtggccgtgcccagccaggatgacgtggatgcgctccccgccatcgccagccgctcgcagatcccggtggtggccgacatccacttcaacccgaagtacgtgatcgcggccatcgaggccggctgtgcggccgtgcgcgtcaatccgggcaatatcaaggccttcgacaacaagatcgccgagatcgccaggtcggccaccgaacacggcaccggcctgcgcatcggcatcaatgccggttcgctggacaagcggttgcaccggctgtacgaaaccgacccggccggcgcactcgtgcagtcggccctcaacgaggcccggctcttcgaggatgtcggcttccgcgactttgccatctccgtgaagcaccatgatcccgtcatcatggtggaggcataccgtcgcctgtcccaggcctgcgattaccccctgcacctgggtgtcaccgaggccgggccggcgttccagggcaccatcaagtcgtcggtggccttcggggcgctgctcgccgagggcatcggggacacgattcgcgtgtcgctgtcggctgatccggtgcaggaggtgaaggtgggggtcaagatcctggaggccctgaaccttcgtccccgccagttcgagatcgtcagctgtcccagttgcggacgcgcccaggtggacgtctacacgctggccgagcaggtcaccgaggccatgaaggacatgaccatcccgattcgggttgccgtcatgggctgcgtggtcaacggacccggggaggcccgcgaggccgacctgggggttgcctcgggcaatggcaagggacagatcatcgtcaagggcaaggtgatcaagacggtgccggaggacgccatcgtcgaaacgctcatcgaggaagcgaacaagatcgctgcggacttccccgagcagggcacaccccaggtgctcgtctgaggggcacgtcccctccggtccgatgggcccctggcagtgctccccacaaggcagcaatgttccccacaaggcagcaatgtgccccacatggtaatggtgagatcagtgacgacgcagggacggcggaggtagcgagctgatgagtggtgtcgtgcgcgtcctgggaccccaggaccttccccgcgcccgtgcgctgctggaccgcaacccgctggagaacctgttcgtcaatgcccgcctcgacatgggtgggctggagcgcaatcgccccgggacccgcgtgtggggatgggagagcgatggcgaactcaccgcactgtgccatgccggcgcgaacctggtgtccgtgggggccgacgccgaggcattggacgccttcgccgagcagctcgggccacggcgcatctcggcgtccatcatgggggccgctgaccagacccggggcctgtatgaacgccttgcgcagcgatggggtgatgcctgggcccatccccgcgagatccgggcccaccagcccctgatgtcggtcgacggcatgtccctgatcgttcccgacgaacgcgtccacccgatcgcgccgagcctgctgcagccctatctgagcgccgccgtgtcgatgtacaccgaggaggtcggggtgtcgcccctggacggcacccgcggctacgagaactatgtgcacagcctcatcatgatgggacgcgccttcggtgcctatgacgaggcccagcgcaaggtctggttcaaggccgacatcgggtgtgcccacgaatgggcctgccagatccagggcgtgtggctcgaccccctgctccgcggacgtggcctggccgaacccgccatggcgcaggtcgtgcgcctgtgcctgcgcgcctatcccgtcgtgtcgctgtacgtcaacgacttcaacaccagggcccgtcgcctctacgagcgggtcggcttccgcaccgtctcggaactggccaccgtcctgtactgacccgggtcgtccgcggtgtccggccgggtcgggcgtcggcaactgccccgcgccgctcacactaggattgtgcgggcacgcaccatgattgggcgcgccagcagctttcggaaaggcatctccttcgtgattacccgcatgagcaagctcttcgtccgcacgcttcgtgacgaccccgcggcggcggagatccccagccaccgcttcctggtgcgtgccggctacatccgccgtgtcgcgccgggcatctattcctggctgccgctgggcctgaaggtgctgcaacgcgtggagaacatcgtgcgtgaggagatggacgccatgggcggccaggaagtgctccttccggcgctgcttccccgtgagccctatgagatctcgaatcggtgggcggagtatggccccaacctgttccgcctggttgatcgcaagggtgccgacatgttgctcggacccacccatgaagagatgttcaccctgctggtgaaggacctgtactcgtcgtacaaggacctgccggtgatcctgtaccagatccagaccaagtaccgcgatgaggcgcgtccgcgcgccggcatcctgcgtggccgcgagttcgtcatgaaggactcctattccttcgacgtcgacgatgagggcctggacgccagctacctgaagcatcgcgacgcctatatccgcatcttcgaccggctcggcttcgagtacgtcatcgtcaaggccaatgccggcgccatgggcggctcggcctccgaggagttcctggcgctgtccgagaacggcgaggacaccttcgtgcggtccgccggcggctacgcggccaacgtcgaggctgtcaccgtcccggtccccgatccgatcgacttcaccgatgcgccgccggcgcgggtcgtcgacacccccgatgtgccgaccatcgacaccctcgtcgccctgctcaacgagcgctatccacgcgaggaccgcgcctggcaggccggcgacaccctgaagaacgtcgtcttcatgaccgtggcccctgacggcacccgcgccccgctggtgatcgggttgcccggcgaccgcgacgttgaccccgatcgactcgcggtggccgtggagccctcggtgatcgagcccttcgaggacgaggacttcaagcgctatcccggccttgtcaagggctacatcgggcccgtgctggacggagcggcgctgctgggcgagaaggcgagctccggcgtgcgctatctgctcgatccccgcgtcgtcgccggcaccacctgggccaccggcgcgaacgtggatcgcaagcacgtgatcggcctggtcgccggacgcgacttcacctccgacggcgttgccgatgtggccgacgtgcgcgagggcgacccggcccccgacaactccggaccgctgaccctggcccgtggcgtcgagatgggccacatcttccagctcggccgcaagtacgccgagtccctcgacctcaaggtgctggacaagaacggcaagctcgtcaccgtcaccatggggagctacggcatcggcgtgtcacgcgcggtcggcatgatcgccgaatccacctgcgatgacaagggcctgtgctggcccgccgaggtggcacccttccaggtgcagatcgtggccaccggcaagggcggcgagatcctcgaggcagccacccggatcgccgagcagctcgatgccgccggcgtgcgggtgctgctggacgaccgcaaggccagtcccggcgtgaagttcaccgacgccgagctgctcggcatgccgacctcgttggtcgtgggccgtgggcttgccgacggggtggtggaattgcgtgaccgcaagaccggttcaaagcgcgaggtcagcgtggaagaggccgtcgacgaggtgctgaccgcgctggaccagctgaactgagcgtcccccgggtgtcgcatcgcacccgggtcccgggggccgggtgatggtggcggcctcagacccaacccggccaccaggccaggcccacgccgtgctgccccggcaccaagcactgggcatcgattccggccatcgcggagcggcgcccatcgctgtccgcgtcgctggctgcggccaggctgacccatgctgacagcacggcggcctccagctcgccccagatggcgtcccagctcgtgggattggtgacatcaccgggaagctcgtagtcgatcgccgggcccgctggcgttgcggatcccgcggtgatctgcgcggccacctgattgcgcacattgtcgaccgccgtgcgtcgttgcttcatgtcggtgcgcgccccacccgagcgtccgatcatggtttccaggccgtagcggagcgcatcgatgcggctcaacagtgcggccagccggtcgtcgcggctgcccacggagatcccggtgggcacggcctgaccggcgacgggcggcgtacccggggaggtgccgtccggatgggcggccagggttgccgcccccgccgtggagaagcagtacagcgacgcccacagcagggaaccggggcccgtgggtgcagccatgagggtcgagcggcagtggtcggccgcggtggcatagccggccgcgagttgggccagcgccccggccgcatcctgcggggggacggctgtggtggcgggcaggtcgatgacgggggagtcgtcggcgttcaccccgcccaggggatcagcccgcaccagggtggtcaggtgctcccggtgggcagtcgttgccccggaacaccaggcagtcgtggcggtgctgagccgccaggattccccctgctgggcgatggtcccggtgagcgttgccagggcctgctcgtccagggcggcagtgcgcagggcgtcggtcgccggtttcagggagccccgggcccggggcgcgttgacgacgggcgagggagcacaaccgaccaatgcgacggtcagggccgcgaacaggaaggaacgacgagtcggcacccgtcgacactagcggctgggcggcccctgcgcgggagcgccttctgatgacctgcgcgggagcgcgttgtggtgacgtgcgcgggagcgcgttgtggtgacgtgcgcgggagcgcgtcgcggtgacctgcgcgggagcgcctcccgatggcctgcgcggggatgtggccggtgggccccgggccggtccttcggccgcgacgcgacgccggcgggcgtctatgctggttgctgcacaacagaagcgacaaacgtatgaggagccggtcatgaccgaatcgacgctgatcgacctactggatcccatcgtcgcagagcacggcctggagatcgatgagctgaagatcgtgcgggccgggaagcactcggtgttgcgcatcagcctcgatggcgacggcagcgaggggcacggccccgacctcgaccagatcgcggatgccacgcgcgccatctcacacgccctcgatgaggccgaggcccccagcaactcgccctacaccctggaagtgagctcgcgtggcgtctcggcacccctgacgcgcccggcccattggcggcgcaatgctactcggctggtggaggtcacgccgctggagggggagaagtacaccgggcgcatcaccagcgccgacgaagacggcgctgaactggagatcgacgggcagccccgtcacgtcgacttcgggcaggtgcgcagggcagtggtgcagatcgagatgaaccgcaagagtcgggaggactgacatggatatcgacatgaccgcgctgcgagcgctggaacatgagaaggaaatcccgctggattacctcgtggggacgctggaggatgccctcctcaacgcctatgagaagaccgaacatcccaagcccggtgcccatgtcgtgctgaatcgtcgcaccggcgaggtgtcggtgatggtccccgaggtgaacgacgagggcgagtccgtcggcgagtacgacgacacgcccactgacttcggacgcgtcgccgcctccactgcccgccaggtgatcttccagcgcctgcgtgaggccgaggacgagcagaagtacggcaagttcagcgccgtcgagggcgacgtggtgatgggcgtcgtgcagcaggaccggggttcgaagacgatccgggtcgacctgggcgacatcgaggccatcatgccgctggccgagcaggtgcccggtgaggactacaagcacggcacgcgactgcgcgtctacgtggtgacggtgcgcaaggaggcccgcggtccccaggtggtcgtgagtcggacgcacccgaacctggtgaagaagctcttcgagctcgaggttcccgagatcgagcagggcgtcgtcgaggtcaaggcgatcgcccgcgaatcgggccaccgcaccaagatcgcggtcgtgtcacacaatccggatgtctcggccaagggcgcctgcatcggcccgatgggccagcgggtccgtgcggtgatgcgcgagctgaacgacgagaagatcgacatcatcgattggtcggccgatcccgccgaattcgtggccaatgccctgagccctgccaaggcgctcaaggtgacggtggtcgacgccggtgcgcgggctgcccgggtcatcgtgccggactaccagctcagcctggcgatcggacgtgagggacagaatgcacggctggcggcccggctcacgggctggcgcatcgacatccgtcccgataccgcccctgatgtgccgcccgccaatccggggcgtccactggaggttcccgacggtgcgcagcaggccgagaccggggccgagggccccgcacagtcctgagccctgcgggtggcgcccccggacgaccccatattggcccacgactgcacgttggcccatgaccgcatgacgggccccgagtgcatgactagccttgcgttgtgagatccgaccggtgcatgcgcacctgtgcagggtgccgacgcgtggtgcctgcccccgaactgacccgattcgtggtgcgtgaccagcaggtggtcgcagacccccgggcggtgctgcccggccgcggtgcctggttgcaccgcaacgagcagtgctgggtcggggccacccgtggtggattcgccagaagcttccggcagcgggtgcatccgccccaggccccgccgcccggttggtgattgttggggtgcgcgcgtatccttgaatgcgcgcgccatcttggtgcgtagtcaggtgtgccgcttttcgcggctcatgccagtcattttcagaaagtgggctaacgctcatgaccactcgatgagtacacagcaatgagcacaaccaaccaataactggtcctggcccaagacgcctggacctggaggagagtagtggccaaggtccgcgtctacgagctcgccaaggagctcggactcgaaagcaaacaacttctggcgaagctgaatgatatgggcgaattcgtccgctcagcatcgtcaaccatcgaagcccccgtcgtacgcagggtgactgagaagatcacctcagagcgtggcggggcagacacttcatccgccccgaaggcaggcgccaagggcgccacgccgaagacgagcggcgcacccaagtccgcccgtccggcggccaagcccggtgccgggacgactcccgtgaccccgcaggccccgaaggcggcgaaggcctcatcggtcaagccggccccgcgtcctgcggccaaggtcaagccgacccccggcccacaggtgcatgccaccccgaaggcaccggtcccgcacagcggcccggtgtcgagcccgacccccaggccgggtgcttcagcgcgtccgggttcgccggcacataccccccatccgccgcgccgtccgggttccgcgtcgagcactccgacacagggccacggcaccggtcagggacacagcggcgccaagccggctccgcgcgcggcccgtccgggtccgcgtcccgcaccccgtccgggtgccaccggcgggctgccgggtggcaacaatcgccgttcgggtgccccgcgccccggtaacaaccccttcagctccgcccagggaatgggtcagcagcgtcggggatcctccgagcgttcagccggcggtgccgctggcatgccccgtcccaccagtgcccgtggcactggtggcgccgcagggatgccgcgtccgaacccggccatgatgcccaagcgccacaacaacgcgctggcccctgccggacaacgtgccgctggtggcggccgtggtcgtggcggacgtggccagggcggtccgggtcgttccggtggcttcggtggcttcagccgtccccccatgggtggcggtcgtggcggtcgtggtggtcgtggcggctcaggcacccagggtgccttcggtcgcggtggcggtggccgccgtggtcgcaagtcgaagaagcagcgcaggcaagagttcgacgagatgcaggcgccgagcattggcggcgtgcgcatccgcaagggcagtggcgaggccgttcggcttcgtcgtggctcgtcgctgaccgacctggccgagaagatcggcgtcgatccggcgcagctggtgcaggtcttgttcaatctcggtgagatgatcacggccacgcagtcggtgcccgacgagaccctgcaggtcctcggcgatgaactgaactacaagatcgacgtcgtctcgcccgaggacgaggaccgtgagctgcttgagagcttcgaccttgacttcggcgagaacgagggcgacgaggatgacctcgccgcgcgtccgccggtcgtcaccgtgatgggccacgtcgaccatggcaagacccgcctgctggatgcgctgcgccacacccatgtggtggagggcgaggccggcggcatcacccagtcgatcggtgcctatcaggttgaggcaaacgttgatggcgaggaacgggccatcaccctcattgacacccccggacacgaggccttcacggccatgcgtgcccgtggcgccaagtccaccgatatcgcggtgctcgtggtggccgccgatgacggtgtgatgccccagacgatcgaggccatgaaccacgcgaaggcggctgatgtgccgatcgtggtggccgtcaccaagatcgacaaggagggcgctgatcccacgaaggtgcgtggccagctcaccgagttcgacctggtgcccgaggagtacggcggcgacaccatgttcgtcgacgtctcgtcggtaaccggtcagggccttgaccagctgctcgaggccgtcatcctcaccgcggatgcgtcgctcgacctgcgtgccaatcccgacatgccggcccagggtgtggccatcgaggcccacctcgacaagggccgtggtccggtggcaacggccctggtccagcgcggcaccctgcgcaagggtgactcgctggtggcaggttcggcctatggccgcgtgcgtgcgttgatcaacgaccgtggacaggccgtcgatgaggccccgccctcgatgccggttcaggtgctcggcctgaccagcgtgcccggcgccggcgacaacttcctggttgtcgaggacgatcgcatggcccgccagatcgccgagaagcgcgaagcgcgcatgagggctgcccagcaggcggcctccagcaagcgtcgcacgctcgacgagctcttcgagcagatggagaagggcgagaccaacgagctgctgctcatcctcaagggcgattcggccggttcggtcgaggccctggaagatgcgctgtcgaagatcgacgtgggcgacgaggtcgacctgcgtgtcatcgaccgtggcgtgggtgccatcaccgagacgaatgtctcgttggcagccgccagtgagccgcacgccgtcatcatcggcttcaacgtccgcccgaccgtccaggccgcgcgcatggccgatcaggacaacgtcgacgttcgctactacacggtgatctacgacgcgatcgacgagatcgagtcggccctgaagggcatgctcaagccgatctacgaggagaagaccctcggaaccgcagagatccgcgagatcttccgcagttccaagatcggcaacatcgccggttgcatggtgctcgatggcctcatccgccgtcatgccaaggcacgcctcatccgcaatggcgtcgtcgtcacggagacctcgatctcctcactgcgacgcgagaaggatgacgtcaccgaggtccgcgagggctttgagtgcggcctcacgctggagcgctactccgatatccatgtcggcgaccagatcgagacctacgaaatggttgagaaggcgagggacaagtaatggccaacccgcgtattgcccggctgcaggatcagattcgcgtcattgttgcccagatgctccaatcgcgcatcaaggatcccaggctcgggttcgtcacgattaccgatgtgcgcctgaccggtgatgcgcgggaggccaccgtcttctacacggtgatgggcaaggaggacgacctggtcgccaccgctgcggcgctggagtcggccaagggcctgctccgctcgacagtgggcaagcgactcggactgcgctacgcaccgacgcttgacttcgtgccggacgccacctcccagaccgcgcaggacatggaggaactgatcgcccgggcccgcaagtccgacgaggagctggcctcgcgcaaggggcatgactatgcctccgagccggatccctaccgtcaggatgatgaagcaccacaggacgacgagcaggagtgaatcgccctgacaacacggcctccgggctgttgatcgtcgacaagccggccggcctcacctctcagcaggtggtcggccggtgtcggcatctcctgggcacccgcaaggtgggccatgccggcacgctcgaccccatggccaccggcgtgctcatcgtcggggtgaaccgtgccacgaggctgctgggacacctcgccatgcacgacaagcgctatctggccaccatccggcttggcgcgtccaccaccaccgacgacgccgagggcgaggtcgtcgcgcagaccgatgcctccggggtggaggacgagcaggtcaatgccggcatcgccgggctgaccggacagatcgaccaggtcccgagctcggtgtccgccatcaaggtgaatggccagcgggcctatgcgctggtgcgcaagggacaggacgtgacactggccgcccgacgggtgacagtgagtgatttcacggtgctggccacccggcgcgagggacccttcatcgacctggacgtcaccgtcgagtgcacctcgggcacctatgtccgtgcgctggcgcgtgacctcggggcgggcctgggggtcggtggacacctgaccgcgctgcgccgcacgcggatcggtcgctacctgatcgacgacgcggtccagcttcccgaccgggattccgaccagcccgcgccgcccctgatgcccatggcgcgcgccgccgagctgagcttcccggtggtccacatcgacgccgcgcaacgacaggccgtgggctacggcaagcccctcgacctggtgctgcccggtccgctcgcgggcctggtcgacgagcagggggagttggtcgccctctaccggcccgatgagcgggtcggccgggcacgcccggcggccgtcctcatctgaggcagcccgcaccgcgatccgcgccgccccgcggcccctgacggttcgacacgccgatgtcaacgcaatcactcccaaacacgtgaatcggcgatggacgcatgtgcatatcggtcgtgcatcgcaatcgggtgcgggaagctgatagctgtcggtttccgatcagtgtcgctggaatccggctcaccctcaccaatcccacgtccgggattggcattcacgacgatgtgtggagggagctctcatgcttctgttacaaactgtgacatcggcccagatcttcggttcggagttcttgggcacgatgcttcttacgatgctcggtgttggtgtggttgccaacgcgttactcgccaagacgaagggacatgccggaggaccacagttcatcaactggggctggggtattgcggtcatgatcggcgtctacggcgcctaccgcaccggcggccacctgaaccctgccgtcacgctcggcctgtgggccggcggtaagccactggcagccggcatccccgccaccggcaccaacatcatgttgtatatcgtcgcccagatgttgggcggcttctgcggtgccgtcctggcctggttggtctacaagcgccactacgacgagcccggggagcccggcgacaagctgggtaccttctgcaccgcacctgcgatccgtgcctacggctggaacttcctggtcgagttcatcggcacgtgggtgctggtcatctgggtcatcctgtcgggctacaccaacatcgcaagcatcaccatcgattcgaccggcatcagcaatgtcaccggtaccctgatcggccccctcggcgtcatgttggtcatcgtcggcatcggtaactcactgggcggacccaccggatacgccatcaacccggcacgagacctgtcgccgcgtatcgcccacgccatcctgcccatcaagggcaagggcggctccgactggtcctactcgtgggtcccggtcatcgcacccctggcgggtggcatcgccgccggcctcacctaccagctgttctggtgagaccttccgtatgctcattccaactgtgtgttccagctagccaattgaggtttaaccatgagtcaagagaagtacattctcgccatcgatgagggaaccacgtccgccagggcgatcatcttcgaccattccggccacatcgtgtcggtgggtcagcaggagttctcgcagatcctccccaaagccgggtgggtcgagcacaatcccatcgagatctgggatgccgtgcgcgcggtcgtcgggcaggcgctgtccgccggcgagatgaaccgtcaccagatcgccgcggtcggcatcaccaaccagcgcgagaccacagtggtgtgggaccgcgagaccggtgagccgatctacaacgcgatcgtgtggcaggacacccgcacccaggagatctgtgacgaactggccggcgaccagggcgccgaccgttacaaggacatcgtcggactgcccctggccacctatttctccggtccgaagatcaagtggatcctcgacaatgtgcccgaggcccgcgagaaggcggaggccggcaagctggccttcggcaacatggacagctgggtgctgtggaacctgaccggcggcctgctcggcggcggcgtccacgtcaccgacgtcacgaatgcctcgcgcaccatgctcatgaacgtgcgcacgctgcagtgggacgagggcatgtgcgaggccatggggattcccatgtcgatgctgcccgagatcaagtcctccagtgagatctacggctacggccgcaagaacggcctgctcatcgacacccccgtcgccggcatcctcggcgaccagcaggcggccaccttcggccaggcctgcttcgagaagggcatggccaagaacacctacggcaccggttgcttcatgctgatgaacaccggcaatgagccggtcttctccgagaacggcctgctgaccaccgtggcctacaagatcggtgaccagccgcaggtctacgccctggagggttccatcgccgtggcggggtcgctggtgcagtggctgcgtgacaacctgaagatgatcgagaccgccccggagatcgagccgctggcgcgcagcgtcaagacgaacggtggcgcctacttcgtgcccgccttctccggtctgttcgctccctactggcgctccgatgcccgtggtgcgctggtgggcctcacccgctatgtcaatcgtggacacatcgcccgtgcggtcctggaggccacggcctaccagacccgcgaggtgcttgaggccatgaacgccgactccggtgttccgctgcaggagctcaaggtcgacggcggcatgaccgccaacgagctgctcatggagttccaggccgaccaggtgggcgtgccggtggtgcgtcccgtggtcgccgagaccacggccctgggtgccgcctacgcagccggcatcgccgtgggcttctgggaaggcgagcaggacgtcatcgacaactgggcggaggagaagcgctgggagccgacgatggacgccgaggagcgcgatcgcctgttccgcaactggaagaaggccgtcaccaagaccttcgactgggtcgacgacgacgttgtcgaatgagctgaggccatcgtggcctgacgccgtacttacctgacgccgtactttcctaacacggtggtggtccggcgccgaagtggcctgatacggcatggatccgctgcggggcgggagggttcgaaccctcccgccccgcagcatgtccatggggtccacgttcacggatggacggtatcccgattgatcggtgcggggcatgcaccccgcccgccgggggtccgcggagcgtgaaacgcgcacagcaggttgccgggaccagcgtctagactttgcggggccggtcgtcgtgaccggcgcggacttcaccccacgggaaagggactcgatgccacatagcgtcgtcgtcatcggcaacttcgacggggtgcatcaggggcatcagcggctcttgcaggttgcccgggagcgggcccacaccctcgccgagggtggacgggacctcaaggtgattgcggtgacactgtggccacatccgatgacggtcttcgccgctgatcgtgcgccacgactgctcaccaccctggacgatcgccttcggctcctgaggcactacggtgccgatgaggtgcgggtgatccagttcaatcgcgaggtcgccagttggtcgcccgaacgcttcgtggacacgatggtgcgccctctgaacccggccgtggtgatcgtcggggccaacttcaccttcggcaagggggcccggggcaccggtgagacgctgcgggaattgtcgggcggcgatttcgaggtgcagaacctggggctggtctcggtggggggacgcaagacctcctccagcttcatccggcgtaccctggccgccggcgacgtggccaccgcggcacatcacctgggacgcaccttccgcgtcaccggcgtggtgatggtcggcgaccagcgcgggcacaccctcggattccccacggcgaacctggccatctcggcggaactggccacgcccggcgatggggtctatgccgggtggctgacgcccctggacgagccggacgccgagccactcgaggccgcgatcagcgtcgggaccaatcccaccttcgacggggtggagcgtcgcgtcgagagctatgtcgtcgaccgcaccgacctgcacctgtacgggcgccacatcgcggtcgacttcgtcgaacacctgcgcgggatggcgcgcttccatgacatcgacgagctcatcacccagatgcattccgacgtcaagcgcacccgggaggtactggacgcgacacgtcccacggcaggtgtgaccggcgcggggatcccggctgattcctggtcggcgcaacgggactgatatagtcgccgggttgccgtcgatcggccgcggagtaccaagggctgccaacacacagggtagggcagcgccgcgcagcgggaactgaagggagcgaccagtcatggacgccgaagagaagaagaagatcgtcgaagaatacgcgacgcacccgggtgacactggttcccccgatgtgcaggttgcactgctgaccaagcgcatttcgcacctgaccgagcacctcaaggtgcacaaaggtgaccatcacagccgtcgtggcctgatgctcatggtcggccagcgccgccgcctgctcaactatgtggccaaggagaatgtcgagcactaccgtgatctcgtcaagcgccttggtattcgtcgctgacagccacaaaccagacattcaggaactggacatccggaaacctggcaggaagggccgccccagctggggcggcccttccttgttctcctgccggccgccgaccattcatgcgtccgaaacgcacaaagcgtactcaggctgcatgttcgggtaggcttgtcgaggttgtgccttgcgcacaccgtccagacgctgccgtcatggtcgccagcccaggcctcggtcctcggtggtggactgcgggcacgccccgctgtcctcgatcgaagaccggcactgtgaggcgcccatgccagcggctattccccaatgaaaggaatccccgtggagggacctgacatcaagttttccgaggccattatcgataatggcaagttcgggaagcacatcatgcgtttcgaaaccggtctgctggcccagcaggccgacggcgctgctgccgtctaccttgacggcgacagcatgctgctgtccaccacgacggcacagaagaagccgcgcgaagcgatcgacttcttccccctgaccgtcgacgtcgaagagaagatgtatgccgtgggtcgtatccccggctccttcttccgtcgcgagggtcgcccctcggagaacgcgattctcacctgtcgcctgattgaccgtccgctgcgtcccgccttcaagaagggcctgcgcaacgaggtccaggtggtcgtgaccgtcctggcgctcaacccgcaggtcgagtacgacatggtggccatgaacgccgcctcgatgtccacccagatctcgggcctgccgttcagcgggccgatcggtgccgtgcgcatcagcctcatcggtgaccagtgggtgtgcctgcctaccgtcgaccaggagaaggacgcaaccttctcgatggtcgttgccggccgtgtactgcccgacggtgacatcgccatcatgatggtcgaggccggcggcaccgaagccacctgggagctcgtcaagggcggacgcaccgcacccaccgaagaggtcgtggccgccggactggatgccgcaaagcccttcatcaaggtgctgtgcgacgcccaggccgagctcgccgcccaggtgaacaaggagacctacgacttccccgtgttcaaggaatacgaggacgacgtgtgggatcgcgtcaaggaactcggctacgacaagctcgacaagatcgagcaggttgccgccaagctggatcgtcaggaggccgagagcgacctcaagcacgagatcgtcggccagatggtgggcgaggaggacttcgagggccgcgagggcgagatcgccggtgccttcaaggcccttgagaagaagatcgtgcgtgaccgtgtgctcagcaagggcgtgcgcatcgacggacgtggccccaaggacatccgggcactgtccagcgaggtgggcgtcgtcccgcgcgtgcatggttccggactgttccagcgcggcgagacccaggtactgggcatcaccacgctgaacatgctcgacatggagcagaagctcgacaccctgagctcggtgcacacgaagcgctatatgcaccaatacgagatgccgccctactcgaccggcgagaccggtcgtgtgggttccccgaagcgccgcgaggtgggccatggtgctctggcatcccgggccatcgtcccggtgctgccgacgcgcgaggaattcccctacgcgatccgccaggtcagcgaggcgatcggttcgaacggttccacctcgatgggttcggtctgcgcctcgacgctgtcgctgctcaacgccggcgttccgctcaaggccccggtcgcgggtatcgcgatgggcctgatgagtgagaccgacgagtcgggcaagacgagctacctcgccctgaccgacatcctgggagccgaggacgccctgggcgacatggacttcaaggtggccggcaccagcgagttcgtcacggcgctgcagctcgacacgaagctgaatggcattcccgccgacgtgctggccgctgccctgctgcaggcccgcgacgcgcgccacgccatcctcgacgtgatccacgatgcgatcgacagccccgatgagatgagcccctatgcgccgcgcatcatcaccgtgcacattcccaccgacaagatcggcgaggtgatcgggcccaagggcaaggtcatcaaccagatccaggacgacacgggcgccaacatctcgatcgaggaggacggcaccatttacgtgggcgccgacaatggcgatgccgccgaggccgcacgcacgatgatcaatgcgatcgccaacccgacgatgcccgagcgcggcgagcgctacctcggcaccgtggtgaagctgaccagcttcggcgcattcatctccctgctgccgggcaaggacgggctgctgcacatcagcaagctgcgcgccctcaacgacggcaagcgtgtggagaacgttgaggacgtgctctccgtgggccagaagctgcaggtcgagatcagcgacatcgatgatcgcggcaagctgtcactggttcccgtgctcgacgaggacgactccgacgacgagtgatccacatgccagcgtgatcgctggatgagcacctgagcactgggggccggccacagacgtggttggcccccagtgcttcatatggccttgcggtccggggaccatcagccaccttgagcggtggatccccctgtgcgagcgtcgcgacgggtaggctgacagcgctgccggtagtggttccggtgcgaggcgtcgaggggagcaatggtgaaggttggcgtattcggagccagcgggcggatgggtgcgaccgtggtccaggcggtcgaggacgaccccgacatggagcttgttgcccgcatcagcgagggcagtgaccttgccccggccgagcacgcggacgtgatggtcgacttcacccagcccgactcggtcatggccaacatcaaatggtgcatcgaccatcggatcaacgcggtggttggcaccaccggcttcaccgaggagcgactcgaccaggtgcgcgactggctcggcgccgagccacggtgtggcgtggtgatcgcaccgaacttctccattggtgccgtgctcatgatggccttcgctgccaaggcagcccccttcttcgactcggtggagatcatcgagctgcaccatccccgcaagctcgacgccccgtcgggcactgcgcggacgacggctgagcagatcgccgcggcgcggcagaaggctcattccaagccgatgcccgacgccacggtggaggagcttccgggggcccgcggcgcccgcgtcgacgggatccccgtccactccgtgcgcctgcagggcctggtcgcccaccaggaggtgctgctcggactggcgggggagaccctgaccattcgcgatgactcctacgaccgggtttccttcatgcccggcgtgctggcagcggtgcgagccgtcatgtcccgccccggcctcaccgtcggcatgaaccagatcctcggactggactgaccaccatgagccggtcatcgcatcggggacgcgatgtgatcatcttcagcatggtcctggcactgctgggtgtggccgtgatggtggtggaccatgtggtgcgtgaccgcgccgagcaggcgatcgatgacaagctgaccgccaaggtgggaacgctcagcgaggtgcacaccaggatcaccgatccgatcttcctcgcttcggccgtgcagaacaaggtctcgggtgccgagctgacgctgggctccttcaccctcacgggcggcacccgcacggtgcacgtcagctcggccacggtgaacctgcacaatgtgagtccgctgacaaagccggccgaggccaccgtcgaatcgctggatgccgccgtcacggtggactgggcgaccctgtcgagcctcaccggtgtgcagctcagctatgccggcgatggacgggcagccgggtccacgaacatcacggcgggcagccagacgatccccatccaggtcaccgcatcgctgaacgtcaacgatccccatggccagctcggcctcgtctcgcccagtgccaccctggccggcgtggacgttccctccgatgtcatcgcgggggccacgaaggccttccaggacaagctgaccctgccgaccgtgggcgacgggctgagttactcgagcgtgacgctcaccgaacagggggctaccctgggcgtgcacggcgaccacgtcgacttgggcaagctcaagcagtagcggtcccggaccctatttcagggccgtgtgcaatcggatctgacgagccttgatgccctgctcgtcgccgacctcccgatgggcaccatcgggcgcccatccgctggcctccaggaaggcgcgcaacggatcgtcggtggtggcgacccaccacgtggcccgcacgaagccatcggcacgcagggtgtcgaccacggcgttcagcagtcgtgagccatgcccttcatgcaggtgacgcggatcgatcacgaattccccgaccagggcgtcgtcgacggcacagtccggatcgtcgctggggccgatcgccgcgaagccgcgcaccgccgtgcgggtgtcgtcctgggcgatgagtacccggtagatggccaacgggggagttgcgatcgcctcgcgccaggcctgctcgatctgtgcagggccgggcagctcatcggcgagtccctggtcatgccaggactcgcgttggatggccgcgatggctgccgcctccttgggcatggcaagtcgcacgaacccggcgccggagctctgagaagtcaccgccccacactaacgcggccatcggacctgcgagtggggccggcgatggccccggcgcgggtcccggcgtccgggcggcagggggacaggcctcccgctagggtggtgcccgtggcacatgacggattgaagagcccctcaaagctggcggctgacaccctgcgcatcattcccctcggaggattgggtgatgtcgggcgcaacatgacctgtttcgaggtcaatggcaagatcctgctggtcgattgcggggtgctgttcccggaggacaaccagcccggtgttgacctgatcctgcccggcctcgattacttggagggtcgcctcggcgatgtcgtcgggctggtgctcacccacggccatgaggaccacatcgggggcgtgccctatctgctgcgcatgcgcgaggacatccccatctatggcagcaagctgaccctggcgctggtcgagggcaagttgcgcgaacaccgcatccgccatgccgagttgcacaccgtcaaggaacgcgaccaggtggccctggacatcttcgacctcgagttctacgcggtcacccattcgatccccgatgcactggccgtgttcatccgcaccaaggccggtacggtgctccacaccggcgacttcaagatggatcagctcccgctcgaccaccgcatcactgacctgcggggtttcgcgcatgccggcgaggagggcgtcgacatcctgttggcggactccaccaatgccgaggtgcccggattcaccccgctggagcgcgacatcctgccggccctggaacgggtcttcgcagaatcgacgcagaagctggtggtggcctgcttcgcctcccacgtgcaccgcgtccagcagatcatcaacctggccgtgaagcacgaccgcaaggtctgctacgtcggacgctccatggtgcgcaatatggccatcgcccgcgagctgggctatctcaaggtgcccggtgacctgctcatcgagatgtccaagttgaacgattatcccgatgacaaggtggtcatcatctgcacgggatcccagggtgagccgctcgcagccctgtcccggatcgccaaccgcgaccatcccgtgatctcgatcgacgccggtgacacggtgttgttcgcctcatcgctgattcccggcaacgagaatgcggtctaccgggtggtcaatggactcacccggatgggggcccatgtggtgcaccgtggcaacgccttcgtgcacgtgtcgggccactccagtgctggtgagttgctgtacctgtacaacatcgtcaagccgcgcaatgccctgccggtgcacggtgagccgcgccacctcgtcgccaacgccgaccttgccgtggccaccggcgtgccccgtgaccgggccatcgtcgcccaggacggtgatgtggtcgatctcaagaaggggcgggcgcggatcgtgggacgcgtggacgcctcctacatcttcgtcgacgggtccaccgtcggtgacatcaccgagagtgcgctcaccgatcggcgcatcctgggcgaggagggcttcatctccgtggtcgtggcggtcgatctgcgtgacggatccatcgtgtcgggcccggacctgtcggcccgcggcttcctcgaggatccctcgatctttgacgatgtcaccgcgcgcatcgccaagtcggtgcgttcggcgctcgatgagggggtcgacgacgtacaccgtctccagcaggtggtgcgacgcaccgtcggacaatgggtcagcaatacctatcggcgccgtccgatgatcgtgccggtggtcattgccgtatgacgggcaccggccattccccggcccggcgtccgatttgagctcgtaggtggctcggggataagcttgtccggttgcgtcggaagcggcgctgactgtttcccaagtttctgtcatcaagaggtcaaggagtcgccatggctgccgtgtgcgagatctgcggcaagggtcccggcttcgggcacaacgtgccgtggtcgaagaagaagacgaaccgccgttggaatccgaatattcagcgcgtgcatgctgtggtcaatggcacagcgaagcgcctcaatgtgtgcacctcctgcctgaaggctggcaaggtcagccgttgagcagggcgttcgcgcacctgagctgaactcacagattttgcctgagggcccgtccacccgtcggtggacgggccctcagcatgttcatggtggacgagccatgtcacaggcagtggttaggctcggggcgtgagcgcttcgtcaaggccggccccgggccatcatccccgcaccgcggcgtcccgccgtgtcccgggccgggtggtcagcccatttcgcacggacaccttcgagcgcctggaggcgaccctgggcagcgtcttcggctcacgcactgccaaggccctgtccgccgtggggctgcacaccgtcgatgacctgatgcactacacgccgcgtgactatctgtcgggaacgcagcgcaccgacctgcgaacgctcgtgcccgatgagcgggcggcggtcgtggcggaggtggcctccctgtcgtcggcgcccttccggggcgacccacgccgttaccggctggaggcgcggctcaccgacggacgcggtttcctcaacctcatcttcttcggcaagaagtacctggtcgactactggcaacggcagctctcgatgggggagcggggcatcttcgtcggcaagatcggtgagttcaatgaccagctgcagatgacccatcccgacttcgtcatgctggacgccgccgggcgcatcgtgggtgccgccgatgagaagcgcgccctgatggcgcaggtggtcacgaaatcagacatcatcggcatctatccggcccgcgccaccctgccgacctggcagatcgccgaatgcgtggccatggggctcgacatgctggcgggcatcgtggacttcctgccgccctcgctggtgcgtgaggagggcctcgtgggcctgtgggaggccttcgacctggtgcatcggccgagggtccccgacgacgtcgcccgtggcctgaagcggctcaagttcgacgaggcgctgggcctccagctcctgatggcctatcggcgcaaggaatccagtcgccatcgcgcgccggtgatcacccaccgcagcggcggcctgcttgatgccttcgacgccgccctgcccttcaccctgacccggggccaacgcgccgtgggtgacgagatcgccgccgacatgtccgggtcggtgccgatggcccgcctcgtccagggtgaagtcggatccggcaagacggtcgtggcgctgcgggccatgctcgccgcagtcgatgccgggcatcaggccgtgctgttggcccccaccgaagtgcttgcggggcaacatgagggatccatccgcaagctgctcgggcccctggccgcggcgggcaccctggacgccccggagcatgccacgcacctggtgctgctcaccggcgccgtcaccggtgccgcgcgcaagcaggcccttgccgcgatcagttccgggcaggccgggctggtcgtcgggacccatgccctgttgtccgaggccgtgcacttctccgacatcggattgatcgtggtcgatgagcagcatcgtttcggcgtcgagcaacgagcggtcctggccgaccagggtgaccatcgcccccaccagctggtgctcactgccacgccgattccacgctccgtggcgatgaccgtcttcggtgacttggagctgtccaccctcagcgagctgccgcagggccgggcgggcgtccagaccaccgccgtgctcaccgcgcagcatcccacgtggctggcccgggtctggcagcgcgtgctggaggaggtccaatccggacggcaggcgttcgtggtgtgcccccgggtcagccagaccgacggggggaagtcggctgagccggttgccgccgctcaggaggtcttcgaacgcttgggctcccacgagctgaagggcttgcgccttggtctgctgcacgggcggatgagtggagccgacaaggaatcagcgatggcagccttcgcggcgggccagaccgatgtgttggtcaccaccaccgtcatcgaggtgggcgtggatgttcccaatgcgagcgccatggtggttctggacgccgatcgctacggggtcagccagttgcaccagctgcgtggacgcatcggacggggaagctttccgggcatctgcctgttcgtcagcggggttgacccacggacccccgcggcgcagcgcctccagcaggtggcgcagaccaatgatggcttcgccgtggccgagctcgacctggaacagcgccgcgagggcgacgtcctcggggcggagcaggcgggtggacgcagcacgctgaggctcctgcgcgtgctcgatgatgccgacctgatcggacgggcccgcgacgtcgccgcagcactgtcgaccactgcgctggaatcacttgaccccggcctgcaggacatggtgaaggccgcccaactcaacgcggacgccgcctggatggagcgcgactgagtcgcgccccactggccggggtccggacctcgcggggtccggtgtgctcgcggggttcggtgtgacagtgccgccgggccgccgcatcccggtgtttggtgggcgcctaggactgggagggctcagggccgaagaggaaggtccttccggtcaccctcgtcggcgtgatccgcacccagttcttcttgacggtcggcacccacggcagcaggggagccttcgccacgcgtgcgagctcgtcctcatcggtgatgaaggagccggttccgcgcacgagcacgctccaaccgccctcctcgctccatccgtcggcctcgaaggccacgtgggaattcagcgcgagcttctcgagcttgctgccggccgcactgcggaagacgatcgactcgccgtcgaggcagaagttcaccgggtacacctccggcaggttgtcggagctcaccgcgatgcggcccacgtcgacgctggcgaggtatccccacgtgctgtcatcgggaatgggggagatcgggttcgttgtgtcagccatgacaacatctaaccccagcccgggcgtccgggccagcgtcgcagccgtacgccacgccccggctagccttgggccgtgagcagaatcattaccggatcagccaagggtgcacgtttgatcaccccgcaggggtcccaaacccgacccaccaccgaccgggtgcgtgaagccctgttcagctccttgtcgacatgggccggcacggcagccgaggatcctgccgagcaattgtccggactcgcggtgctcgatctgttcgccgggtccggggcgttggggctggaagcggcgagcaggggcgccgatccggtcacctgggtcgagaaggaccatggcgttgccgccgtgatcaagcagaaccagaagcacacccgcctgtccgggcgcatcgtgacggcatcggtacgcaattttttggcacagcccgccgcccacgccaatgacgtgatcctgctggatccgccctatgagttgagcaacgatgagctggtcacgctcatggcaaccgccctggcacacggctatttgctgtccgacgggatcttcgtggtggaacgctcggtgcgcgtgggggaaccggactggccgggtggcctcgaactcagttggacgcgacgctacggtgagagctgtttgtacttttgtcgtgccgccgaagggaacaaggatgattgagcccgtacgggccgtgtgcccggggtcgttcgatccgatcacccgtggtcatctcgacatcatcgagcgcgcccgcaccgtgttcagcgaggtgatcgttgcggtgggccgcaatacatcgaagaattacctgttcgagggtgatgagcgcctggaactggtgcgggaatccgtggcggacatcgacggtgtcaccgtggagcccatagacggactgctgagcgagttctgcaaggaacatggcgcctcagtgatcgtcaagggcgttcgcttcggctccgatttcgactacgagctgcagatgggccagctcaatcgcattctgtcgggcatcgagacggtcctgctgccggccgggcgcgaatacggcacgatctcgagttccatgctgcgggaggtggcggcgaaccacggcgacatcagccccttcgtgacccccgcggtgaacgcagcggtgcgcagcaagctcggctactgacgcggccccaccccaccgtgcgtcgtggcgaggtgatgtggcggtggcgagtcgtcgaaatgttgtgccgcctcctacgattggggtgtgagcacacatcttgacgcccgcaattcccttgtgatcgacacccagcaactcgcccgtcaggcgggagccatgatggaggtccatgacaccgtcgcggcgcctgccgatcttggcattgaaatgatccgcgtgcccgagggcgcggggatcgacctggaccttcggcttgaggccgtcgtcgagggcgtcctcgtgaccggcaccgtcgaggcacccctggaaggggagtgtgcgcgatgcctgaccgatctgcacgaccacggcagctatcgggtcttcgagctgttcaactatgagggacgctccgcagaacctgatgacctcttcctggacggggagctgctcgaccttgacccggtgttgcgcgacgcgatcgtcctcgaccttcccttcacgcccctgtgccgccccgactgcaagggcctgtgcccccagtgcggtgccaacctcaacgagcatcccgaccatcatcacgaggctccccttgattcccggtggagtgcgctgaaggcgctcaccgagccggaaaccggtggaatcggggcccagaacaactgaccgcggtgccgcatgtggaacgtcggcgcggtgccgggtttccacggcgcgcaggccgtccatttggacgaccggcgggtctacgagtaacctaggctgtcgcgtgtctgcaaaggcgcgcattcccattcttgatcgaggagaaataacgtggctgtcccgaagcggaagatgtcccgcagcaacacgcggtcgcgccgctcgcagtggaaggctgcgccggtgaccctggttacctgcccgaaccctgcatgccgtgcgctccacctgccgcacaccgcgtgccccaagtgccatcagtacggtccgcgtggcgagttccgcacggtgaccggaagcctgaacacccgtgaattcgagtgaatccggctccagccgattcgctgaactgatcaaggagctcggtgtccctctggacgccgagctccttggccttgcgctcacacatcgctcctacgcgtacgagcacgggcagatcccccacaacgaacgccttgagttcctgggcgattcggtgctcggcatcaacgtgaccgactatctgtaccgccatttcccggactacgccgagggtcggctggccaagctgcgcgcggccgtggtcagctcggtgagcctggccgaagtggcccgcagcctgggaatcggccaactggtgaagctcggccatggtgaactcaccaccggcggacgcgacaagaccagcatcctcgccgacaccaccgaggcgctgatcggcgccatctacatgacagacccgtcgggtgccgcgaagttcgtccaccacatcttcgatccgctggtcgaccgggccgtgaagatgggggcgggcctggactggaagacctcgctgcaggagatcgcggcggcgatggagtccgatccgcccgaataccggatcagcgagaccggacccgatcacgacaagcgcttcactgcggtggcgctcgtggacggccgcaccttcgaccccggcatgggacacaacaagaagcaggccgaacagcacgcggcggagaatgccttccgcgtgctcgatgccgaagtgaacggtgcggaacagcctgactgatgcctgaactacctgaggtcgaggtggtgcgcgaggggctggcccagttcgtgaaaggcaggcgcatcgacgccgtgcgcgtgcttgatgccagggcactcaagcgtcacgacggtggccctgacgacttcgtcggctcactggtgggcaggcgctgcgacgagccgcggcgtcgcggcaagtacctgtggattccccttgacgggcgtgatgccctgatcgcccacctgggcatgagcggccaattccgggtggacgcccccggagcgccgctaccacagcatgcacgcgtggtgatcaccatggacgatggcacacaactgcgcttcgtggatcagcggctcttcggctccctggcctattgcccggggggagcaggcctacccgaacccattcgacacatcgcgctcgaccccttcgacccccacttccgggtggaagccgtcgccggccgattgcaggcgaagcacaccaccgtgaagcgtgccctcctcgaccagacgctcgtctccggcatcggcaacatctacgccgatgaggcgctgtggctggcgcacaccaactaccaacatccgacatcgctgctgtcgacccgccgtgcgcgcgcggtcctgcgccgagccgccgatgtcatgcgccgggccctggcggcaggtggcacgagctttgatgcgctctacgtcaacgtccatggcgacagcggctacttcgcccgcggcctggccgtctatgggcgggccggacagccctgcccccggtgtggcacggccatcgtcaggcagcgcttcatgaaccgatccagttacctgtgcccgcgttgccaacgcctgccccgtcggctggaacaatccgaaccggcccgtgcaagggcgtcatccagcgcgcacgacgcgcccgaaagataggctagatgcccatgagccagcaagtccccgaggaacccatcgagagccgctcacggcgtgcggccaggattggtggccagttcatccgcttcggcgtcgtgggtggctccggcgtcatcgtcaatatggcggtcgccgtggtgataaacaagctcaatggcggctcggcgaatgccaccgagatcctcttctcgatccctgccacgagtttcaacttccgtttcagctcgctggtgtggatcctgtcattcttggtggcgaacacctacaactaccagctcaaccgcagctggaccttccggggcacccagcgcgcctggtggaagggcttctggcaattcctcgccatcggggccgtcgctgccttcatcggcatgatcctgaaggcgatgatgatgagccctgccggtgtcatctccctgcgcggggcgtggttcggtgcctaccagcaccacagcgggtccatcgtgcagcaggtgctcaatgcggtgcactcgcgtgagtacgtgagccaggccatcgccatcttggtcaccatgcccatcaacttcatcgtcaacaagctgtggaccttccgcatcaagcacgatcaggccattgccgagaaagcacctgtgagcgcatagtggacattcaccattccggcgatccgggagccgtggcgtgtatctgaagagcttgaccctgaagggtttcaagtcctttgcctcggccaccacactcgccttcgaaccgggcatcaccgccatcgtcggacccaatggctcgggaaagtccaatatcgtcgatgccctcgcttgggtgatgggtgagcagggggccaagcacctgcgcggcggcaagatggatgacgtcatcttcgccggcaccgctggccgtccacccctgggacgcgccgaggttacgctgaccatcgacaacactgatggcgtcctgccgatcgattacacagaggtgaccatctcgcgcaccctgttccgcgcggggggttccgagtatgccatcaacggccacacggcccggctgctcgacgtccaggagctcctgtccgacaccggcatgggccgcgagatgcacgtgatcgtcggtcagggccagctcgaccagatcctgcaggccacgccggagatccgccggggcttcatcgaagaggcggccggggtgctcaagcatcgtcgccgcaaggagaaggcggccaggaaactcgagtcgacacgtcagaacctcgaacggctctccgacctcatctcagagatccgccgccagctcaagcccctcggtcggcaggcggccgttgcgcgcaaggcagcggtcgtgcaggcggaactgcgcgacgcccgatcccgcctgctggccgacgacctcaccacagcccggctggcactggcctccgaacaggagaaccaggctggtcaggagaagctgcgtgccgacgccagggtccgcctggaccaggcacgctcccgcgaggcggaggccgaacaggcgctgacggccgcgaatcccgccctcacggccgcccaggagcggtggtacgccgccgtggcactgcgcgaaaggatggccacgatcgaatcgatcagtgccgagcggatgcgccatggcgaggtggcacctgagacgcgctcagcacgggatcccgccgagttggaggcggaggcggcccgggcccgcgcggaggaggcggagctggaagctcaggtcgaggccgcccaggaaagcctggcgcgggcaaccacgcgtcgtgaatccgccgagcacgaccatgaggcggcggaggcggactatgccgcccagctccgggccgtcgccgaccgtagggaggggctggcccgcctttccggtcaggtcggctcactgaattcgaggctcgaggcgggcgccgaagaagtcgatcgactcagccaacgccgcgatgaggccctggcccgggccaccgaggccgaacaggtctatctcgcgttggagagtcgcatcaccggcctcggtgacggcgagtccgatcttgacgccaactatgagcgggccgcccacgagctcgcggctgccaaggaggccctggctgccggtgaccagcaccgagagcaggtggagcgcaatgtggccacgctgtcggcgcgcatcgaggccctggagctggggttggtgcgcgccgacggtgccgctgcgctggccggggccggggttcccggcgtgctgggagcgctgtccgggctgctcacggtcgaatccggttgggagatcgccgtcgccgccgtgctcggcccggcaacagaggccctggtcgtccgtgatcccgccgcggcccgcgaggcactggagactctgcaccgcgatgatctgggccgggcagggctggtgatccaaggagccccgagcgtacagccgtcgtcgggccccgtccccgccggcacccgccgagtgcgtgatctcgtgcaggtaccccagcccatggcgccggcggtcaacgagctgctcggcgaattcctggccgttgaggacctggacgaggcattcgccgtggtgagcggcgatccgcaactccaggtggtcacccgacgcggggaactcctgtcggcctggttcatggccggtggatcgggttcgggtcgcagccgcatcgagctgcaggccgccatcagcagtgcccgtgaggaactgtccgccgcccgccatgaggccgagcgggcgcatttctcgcgtcagcaggctggggaggcggtgtccgcggcgcagaagaaggccgacgcggcactggagctgttgaatgaatccgatgcggcgatgtcggcgctgtcagagcagatctcccaccttggccaggcctcggcaacggccagggccgaggctgaacgtgccaaggcgtccatcgacaaggccaacagccgccgggccgccgacgagggggagcttgaggcgctgaggcaacgacttgaactggcccgcagccaggaggaggtcgccgagccggatccgtcgcggcgcgacgagctgtcggtggcggcacggctggcccggcagaccgagatggacgcccgattggccctgcgcaccggtcaggaacgtgcccgctccctggccgggcgtgccgattcgctgagtcgtgccgcagcccgcgaacgccagagccaggccgaggccgcagcccgccgggagcgggttcgccgggaggcggcagttgccggcgcggtccatgaggcagcccaatggctcgctgcgcgcgtcgaggagctcaccgtcgctgcgcagtccgaacgcgatgaagccgaacgcgcccgcagccaggcggatgcgcacatcagcgcggcacgcgaagaggtgcgtcagcgcagccaggagatcgagtcgctcgtcgagggggcccaccgcgaggaattggcacgcatcgaacaacagatgcgagtggaacagttgacggagaaggcgatgagcgagctcggcatgcaggccgatgcgttggttgacgagttcgggcccgacaagcccatccccgtcctcacccgtccggacggcagcgccctgaccgaggatgacgagcagcccgatccggtccccttcgatcgtggggagcaggtcaaacgcgaacggcgtgcccgccgggcccttgaccagctgggacgcatcaaccccctggccctcgaggaatttgacgcgctcaatgcgcgccaccaattccttgcggagcagttcgaggacctgaagaagacacgcaaggacctggaggacatcatcgatgaggtcgatgcccgggtgcagcaggtgttcagccaggcatatgccgacatcgaagcgaccttcgccacggtcttcccgaggttgttccccggcggcgaggggcgtttggtgctgaccgaccccggtgacatgttggccaccggcgtggacatcgaggcgcgcccggccggtaagaaggtcaagcgcatgtcgctgttgtcggggggggaacgctcgctcgtggcggtggccttcctgttcagcctgttcatcgcccgcccgagccccttctacatcctcgacgaggtcgaagccgccctcgacgatgtgaacctgtcacgcctgctcggcatctacgaggaactcggcaaggattcccagctcctggtgatcacccaccagaagcgcacgatggagaaggccgatgcgctgtacggggtcacgatgcgcggggacggcgtcacgaaggtgatctcccagaggctggtcggctgacgtcgtcgggacaccggccggtggcggggcccgcgccgccatgggggataatggcggtgcaacgcaccgatcggaggtcccgtgatcgtcttcattctggccatgttggccgtgctggccctggcggttggcgtcgtggccatggtcatgatgggcatgcagggatatttccgcgatcgtcatccccggctcgccaggcggttgggcacgctggcacgccacctcaatggtgaggcggagattccgcaggccttgcgcgacctgatccccaggcgctgagtcgtcgggggatcgccgggacccgtgcggggcaggttggttgggggctcatgaccgggggaaccacggacatgcccgctagactgccagcgtggattgggttttctgggtaatcgtcgccggcatcgtcgcagcctgcgcagtcgcgtatgttgcggtccggttcggacgctccaacaagcaggtcacggcggcacctgaggcgaaggccgtcacgccgacgactgtcgagcaggagcccgccgagcagcccggagcgccggcagcgccggcgacagcccaggctgccgccgaggaggcggtctccgaactggagacgcccgaggcccccggcgcgcgcctggcaaggctgcgtcgccgacttgccggctcgcagaacactctggctcgtgccctggccgacctgctcagcgtcgacaagatcgacgatgagacatgggacgacttcgaatcaaccctgatcgcctccgacctgggcgtgggcccggccactgaactcgtcgagaacctgcgcaaggcactcgccgtggggggagtggccgacccggccgccgcccgcaaggcgctgcgcggcgaactcatcaagatcgtcggcccggacatgagccgcgacctcaacctcgaccatgccgagtcggtcccggccgtggtgatgatggtgggcgtgaacggcaccgggaagaccaccacggtcggcaagctgggccgcatgctcgtggcccagggcagaaccgtcctgttcggtgccgcggacaccttccgcgccgccgcagctgaacaactgaccacttggggggagcgcgtcggggttcgtacggtgcgtggcgacgagggcgccgatcccgcatcggtggcattcaatgccgtcgatgagggcatcaccgagggcgtggacgtcgtgctggtcgacaccgctggacgactccacaccaaggtcggtctgatggacgagctcggcaaggtgaagcgggtcatcgagaagaaggcccccgtcaacgaggtgctcctggtgatcgacgccacgaccgggcagaacggcctcacccaggcccgcatctttgccgaagtggtcgacatcaccggcatcgtgctcaccaagctcgatggatcggccaagggaggcatcgtggtccaggtgcagcgcgaactcggcgtgccggtgaagttcattggcctcggcgagggtcccgacgacctggcaccctttgacgcagcacaattcgtcgatggcctcctgggggagtgaccttcaccggtggcctcgcaggtgaccactgcgacgcctgcgatccccgtcgccatctgaccccggccggtcccgttggggccctccccacattcttctgaaacatttccaagcgaggatgatcccgtgttcgacaccctgcagagtcgtctggcagataccttcaagtcgttgcgtggcaagggtcgtctgaccgatgccgacatcgacgccaccacccgcgagatccgcattgccctgctcgaggcggacgtcgcgctgccggtggtcaaggaattcgtcgccaaggtcaaggaacgtgcccatggccttgaactgtcgaaggccctgaaccccacccaacagatcgtcaagatcgtcaacgaggaactgattgacatcctcggcggcaggacccgtgagattcgcttctcgaagggcaccgacccgacggtcatcatgctggccggccttcagggcgcaggcaagacgacactggccggaaaactcggccattggctgcgggaacagggccacagcccggtcttggtggcggctgacctccagcggcccaatgccgtgcagcagctgcaggtgatcggcgagcgggccggcgtgcccgtattcgccccccagcccggtaacggcgtgggagatccggtgcaggtgtcccgggaatccctcgatgaggcccggcacaagctctatgacgtcatcatcgtcgacaccgctggtcgactgggcgtcgatgaggagatgatggcgcaggcccacgacatcaaggccgccgtcaccccgaacgagaccctgttcgtggtcgatgcgatgatcggccaggacgccgtgaacacggcgaaggccttcgagcagggcgtcggcatcgacggcgtggtgctgtccaagctcgatggtgatgcccgcggtggcgcggccctgtcgatcgcccgggtgatcggcaagccgatcatgttcgcctccaacggcgagaacctgacggatttcgatctcttccaccccgaccggatggcctcgcgaatcctgggcatgggcgacatgctcaccctgatcgagcaggctgagaagacctttgacgccgagcagtcccgcgtcagcgccgagaagctgctgcggggcaagggcgaattcggcctccaggacttcctgggacagctcaagcaattgcgcaagatgggtccgctgtcgaagatcttcgggatgctgccgggcatgggcggccagatgaaggaggccgtcgagaacctcgatgagcgcgaggttgatcaccttgaggccatcatcctgtcgatgacgcccgcagagcgcgacgacgtctcgatcctcaatggctcgcgccgggcccgcatcgcggccggtgccggcctgcaggtgcacgacgtgaaccagctggtgacgcgcttcgtcgaggcccgcaagatgatgcagaagttcgggtccggcggtggcgtaccccccatgccgggtatgcccggcatggggggtggccgcgcgatgcggcccaagaaccagaagaagggcaagaagaagcgcggcaagaacggcgcgccactgcgacggggggcccaacgtgccgtcgccccgaagcccaaggggcagccgtcgcaggcagacatctcctcgatgttcggtactccgggctcgggccagggggcagataacttcgagcttccccccgagatgcgcaagctgttcgacaagtagcaacggcgcgacgatgagcacagctgccctcccacaggcccggtcctggcacctgaggggcaccgtgttgccccagggtggggtgcgcgacctgtggatcaccaacggggtggtcgcgcccggaccggtgcccggggcggtcacactggcctccgactgctggatcatgcccgggttggtcgacgcgcactgccacatcgggctggattcgcacggcggcaccaccatggacacggcccgtgcgcaggcccgcaccgaccgtgacgcgggcaccctgctcatccgcgacgccggttcgccgatcgatacccacgagctggaccatgaagcggacatgccgcggatcatccgggctggtcgccacatcgcgcgcccgaagcgctatctgcgtcactacggcgtcgagatcgagaccggccaactggtcgacgaggtcacccggcaggcccgccggggggacggttgggtgaagctggtcggcgattggatcgatcgcgacctgggcgaccttgccccgctgtgggatcccgacgaggccagcatggcgatcgcagcggcacacgcacagggtgcgcgcgtcaccgcccactgcttcggggagcagtcggtggccgagttggtcggtgccggcatcgactgcatcgaacatggcacgggcatgagtgatgaggtgatcgcggcgatggccgccaggggcgtcgcactcgtgcccaccatgatcaacctggccaccttccccgacatcgcgcgggccgcggaggcgaagtatccgcgctacgcgtcacacatgcgggccctgttcgaggggcacctcccgatgctgcgggcggcccgtgaggccggtgtggcgatctatgccggaaccgatgccggggggacgatccaccacggccggatcggcgacgaggtcctcgcgctggcgcagctcggcgatcacgagttcgccctgggcgctgcgagctggcgggcgcgcgaatggctgggggccacgggactggaggtgggcgacagcgccgacctggtggtctatggcgccgatccccgcgaagaactcgaggtcgtgcgccgtccgcaactggtggtcctgcgcggggtgccgcagcagcaatccgcgctgcgctgagtttcactcccgggctgcgtatctggcataatagccatgtctgtgtgccgtggcgccctctcacgtctggcgcacacaaccatcggacgctgtctgcgtgtccccacgcgtgggtcaacggccaaccatcgccccggaacaggcttccgggcagtcctacaggagaaaccacacaccgtggccaccaagattcgtctgaagaagctcggcaagatccgcgagccgcattaccgcgtcatcgtcatcgatgagcgcgccaagcgcaatggtcgtgagatcgaggtcctgggtcagtaccatcccaagaacgatccctccatcatcaagattgactccgagcgcgcacagcactggctctctgtcggtgcccagccgaccgaggccgtcgtggcgttgctgaagcgcaccggcgactggcagaagttcaccggtgacacctcgattccctcgggcgtccaggagcaggccgccaagccgaacaagcttgacctgttcaatgccgcccttgcggaggccgatggggagcccaccaccagcgccatcagcaagaagggcgccaaggacgaggccgccgataccaagcccgccaaggacaaggccgacgacaagccggacgccagcgctgacaagcctgccgagaagtccgacgactcccaggcaaaggcctgatcatgctcgacgatgcgttggagcatttggtcgaggggatcgtcacgcatcccgacgatgtccaggttcgcgacaagaacctgcgacacggaaggatgctcgaggtcagggtccatcccgatgacatcggccgtgtgatcggacgccagggacgcactgccacggcgctgcggaccgtcgtggcggccctggccggtcatgagcagctacgcatcgactttgtcgacgtggatcgccgcggttcgcgtcgacgctgagtagcgcgatggacaccgtggaggttgtcgtcgcagtcatcggtcgggcacatggcgtgcgcggtgagctgacgctcaccgttcgtacggatgagcccgaccgtcgtctgcgtaagggggtccgactgcgggcctcggatccggaccgcagctttgtcgtggaatccgcgaggtgggtctccggtcgcctggtggtgacgctgggcggcgtggcggaccggaacgccgccgaggcactgcgcggcacggtgctcttcgcagacgtgccgcgcgacgagcgtcccgaggactccgaggagttctacgatcgacagctgatcggcatggccgtcgagcttgccgatcaacgccgtgtgggcgtggtgtccgatgtgctccacctgcctgcccaggatgtgctgtcggtgcgcaccgatgccggggagcgactggtccccttcgtgcgcgagctcgtgccccatgtcgatgcggaggcgggagtggtccgcctggccgacgtgccgggactggtcgatgaccgggccatcgatgatggcagcaacacgggaagcaagcagtgagcagcgagcgcgcagaagccgacgctgccgcgccggacacgtcgccggtaggttcgcgaagcgtgatgcgcatcgacacgatcagcatcttccccgaatacttcgcgccccttcacctgagcctgatcggcaaggccatcgatcacggcctgctcgaggtgagcagccatgatctgcgtgaattcacccatgaccggcaccgctcggttgacgacaccccctatggcgggggagccggaatggtgatgaaaccggagccctggggcgaggccctggattccatactcgaacagctgccctccccgcgcaggcggccggtccttgtcgtgccgaccccctccggacgcccgttcacccagcacgccgctgccgagctggcgggtgccgagcacctcgtcttcgcgtgtgggcgctacgagggcatcgaccaccgggtcctggactgggcggacgagcacttcgagctccatgagctcagcctgggcgactatgtgctcaacggcggcgaggtggctgcactggccatgatcgaggccatcgtgcggctcgtgccgggcgtgatcgggaacccggattcactcgtcgaggagtcctactcggccagcacccggggcatgctcgagtacccggtctataccaagcccagccagtggcgcgggcttgaggtgcccggtgtcctgctgtcgggcgatcacggcgccgtcgacgcgtggcgcgcgttgcgctcgcgtgagatcaccgcggccagacgccccgacctgctcgaccaggagtccccggaccgcccatgagcgcggctcaatcgggcagtgccgccagccagcgcgcgcacagtgccgtccacggctcggcgtaggcgccaccggccaggcccagggcgtgcggaccatgggcgaagacatgcagctcgatgggcacctgcgagcgatagcaggcaagcgcatagcgcatcgaattgatcaccggcacgctggtgtcctcatcggtctgccagacgaagcttggcggcgtctgcggatccacgaggcggtcgatactgaatgtgcgacgggtctggtcatcggcgtcggggcccaacagcgtctccatcgacccgcgatgggtgtcggcgtccatcgatatgaggggatagccgaagacggcgaaatcggggcggggaacccggaagccgaatgcctccggatggcaacacatgcccgccaggtgcgcgcctgcggaaaaccccaccaccccgagccgacggtcacggaagccatcaaggccccgcagttcgcccagagcgtccagggaggcctccaacggggccggatggcgctgctgcaccggatattcgatcaccgccgcagcaaccccgacgctggccagccaccgggcaaccggggcgccctcatgctcgggcagcagttggtacccgcctccgggaaagacggcggcggcgaggccgaggtccttgcccggatccggcagggcgatgttcgcgatcacacttcgactcatgccgttcaccgtagtagcgggccgggatcaaattacggaccattttggtctcaaaacgcgaactgctgtcgcgtagcgctgttcacagggccaacccgtgctctactgtgttgccgtggcaactctcactactcaatcagcggacacgactccgcagagcagggcgctgcgctccacggtggccagaaaattcctgatggctctcaccggtatcttcttggtggcgttcctggcgatgcacatgttcggcaatctgaagctgctcatgaacgattcaggcgccgagttcgacgcctactcgcatgcgctccggcagttccttgtgccgatcctcccgccctacttcttccttacgctcttccgcatcgtgctcggtgccgcagtcatcattcacatgggactggccatcgacctcacgctgcgtgaccgcaaggcgagtggtgtgggcttcaagcggtatgtccagcgtcgctacctcgaaggcagcttcgcggcccgcaccatgatctggggcggcattatcatcgccctgttcctggtgttccacctgctgcagttcaccgaccagatcatcaaggttggctactcggcgggcgatccggccgtcgaccagccgcacctgcgcgtgatcctcggcttccagaactggggcatctatgcgatctacttcgtggccatgctggccgtctgcctccatatctggcacggtttccgctcggccttcagcacactcggttggcgtgtcggcaactcgtcgacggtcgtcatcaaggtctgcgcgtggctcgtgtcgatcctggtgttcgtgggcttcatgctcgtcccgacccttattgcctttggagtgatcacccagtgactgagaacaatgtggcgggccttcccgccggcgatgagaagtactacacgctgggcgccgaggtgcatgacaccaaggcgaacaccgatgttccgatcgagaagatctggcccgaccgccagttcaatgccaagctcgtgaaccctgccaaccgccgcaagatgacagtgatcgtcgtcggcaccgggttggctggcggcgctgccgctgcctcactgggcgaggccggctaccacgtcgagaacttctgctaccaggacagccctcgtcgtgcgcactcgattgcggcccagggcggcatcaacgctgccaaggactacaagaacgacaacgactccgtctaccggctgttctatgacacggtcaagggcggcgactaccgagcccgcgagaccaacgtctaccggttggccgacgtgagctccaacatcatcgaccagtgcgtcgccgtgggcgttcccttcgcccgcgagtacggcggcctgctcgacaaccgttcgttcggtggcgtccaggtgcagcgcaccttctacgccaagggccagacgggtcagcagctgctgatcggcgtctaccagtccctgtcgcgtcaggtggcagccggcacggtgcacatgcacagccgccacgagatgctcgaattgatcgtcaaggacggtcatgcccgcggcatcgtgacgcgcgacatggtcaccggtaagatcgagtcgtggactgctgacgcagtggtcatcgcctctggtggctacggcaatgtgttcttcctgtcgaccaatgccatgggatgcaacaccacggcgacgtggcgtgcgcaccgcaagggcgcctacttcgccaacccgtgctacacgcagatccacccgacctgtatccccgtgcacggcgagaaccagtccaagctcaccctgatgagtgagtcgttgcgcaacgacggtcgtatctgggtgccaaagcgcgccgaggacgccgacaaggatccgcgtcagatccccgaggcggatcgcgactactacctcgagcgcatctatccctcattcggaaacctggtgccccgcgacatcgcatcgcgccaggccaagaacatgtgtgacgagggccgcggtgtcggtccggcgatcaaggagatcggtccggacggcaaggagcggatggttcgtcgtggcgtctacctcgacttctccgacgccatcgagcgtctgggcaagcggggagtggccgccaagtacggcaacttgttcgacatgtacaagcagatcaccgctgaggatccctatgagacccccatgcgcatctaccccgccgtgcactacacgatgggtggcctgtgggtcgactacgacctggagagctcgatccccggcctgtacgtcgccggcgaggcgaacttctccgaccacggtgccaaccgactcggtgcctcggccctgatgcagggcctgtccgacgggtacttcgtgctcccgaacaccatgaacgactacctggccggcaatcacgagggcaagctgcccgacgatgatccggcagtggtcgaggccgttgcctccgtgaaggaccgcgtcaacaagctgctggccgtcaagggcgagcgcacggttgactcgttccacaaggaactcggccagatcatgtgggagtactgcggcatggcccgcagcgaggagggcctcaagacggccatcgacaagatccgcgtgctgcgtgacgagttctggaagaacgtcaaggtgaccggtgtcaacgaggatctgaaccagaccctcgagcgcgccggtcgcgtggctgacttcctggagctcggtgaactgatgtgcatcgatgccatgcatcgccgcgagagctgtggcggtcacttccgggttgagtcccagactccggagggcgaggccctgcgtgacgacaaggacttcctctacgtcgccgcttgggagttcaccggcgacgggcagaagcccgagctgcacaaggagccgctggtctacaaggcaatcgaactcaagcaacggagttacaagtgaagctgacactgaatatctggcgtcaggccgagggtgccgacaacggcgccatcaagacctatcaaatcgatggaatcagcggcgacacctcgttcctcgagatgcttgatgagctcaacgagcagttgacccatcagggcgaggagcccgtggcgttcgattccgattgtcgtgaaggcatctgcggaatgtgtggcgtggtcatcaatggcaccgcccacggccgcggcgtgtccccggtgcgcaccacgacgtgccagctgcacatgcgttcgttcaaggatggcgacacgatcacgatcgagccgtggaagacccccgtcttcccggtcatcaaggacctggtcgtcgaccgcagtgcgctggaccgcgtggtccaggccggtggcttcatctccgtgaacaccggtgctgcccccgacgcgcattccacgccggctccgaagcgccaggccgatcgggccttcgacaacgcgacctgcattggttgtggcgcgtgcgtggcagcctgcccgcacagctccgccatgctcttcacgtcggcgaagatcacccacctggcgaacctgccccagggccagcccgagcgcaagctgcgggtcaagaacatggtcggtcaacacgacgcagagggcttcgggcactgcaccaacatcggtgagtgcgcggccgtctgcccgaagggcatcccgctcgagtcgatcaaccagctgaaccgtgacctcattgcgtcgctgttctccggtgacggcaaggagtgatcgcactgcaacagaaccccgacgcccggtcgggatcgtaatcactgcatagtggggatggggcatgcaggccccatccccactactgcgttcgccggggcacctcgtcgccggtgggcactcgggctgtcgcgggtttggtcccagccaccccgatgtgcaaaaattgggggctgttgtgcttgctcggcgcctgccacggggggaatccgaacagcactgcaatccaattcttcagacgaggtgacctgtggcaccggcgaggacaggaacatgactcacaagctcatcagcgagatcaacaaggcgtcgctgcgtagcgatatccccgaattccgcgtgggtgactcactgcgcgtccacgtgaaggtggtcgagggcaacaagtcccgtgtccaggtcttcgccggcgtcgtcatcgcacgcgtgggctccgggctcaccgagaccttcacggtgcgcaaggtgtcctatggcaccggcgttgagcgcaccttcccgctgcacagcccgatcatcgacaagctcgaggtcgagcgtcgcggcgatgtgcgtcgcgccaagctctactacctgcgtggtctgcacggcaaggctgcgaagatcaaggagaagcgcgataacgcgtgagcgactcttccatgagggactctgatcaggggtcccacgccgacatgcccgctcagggaaacctgggcgggcataaggttgcgtccgtgaaggcgaacaagcccaagaagaagcagggatggctctccacggtccgcgagctggcgatcatcatcgtcgtcgccctgatcatctcggccctgatccgcagtttcctgatgcagttgtacgtgatcccgtcggcgtcgatggagaacacgctccagatcggtgatcgcggcgcggtgatcaaggtggccgacttccatcgcggggatgtcgtggtcttcaaggaccccgggaactggttgggcaacgagaccagcggcacctcgaacccggtgcgccaagtcgccgaattcctgggtgtggcgccctcatctgccaccgatcacctggtcaagcgcgtgatcggcatgcccggtgaccacgttgcgtgctgcacagcccagggccagatcacggtcaatggccagcccttggatgaggcctcctacctgtactcggtcaatggggtgtcggttcatccctccgacctgagcttcgacgtggtggttccggccggacatatcttcgtgctcggtgaccatcgcaatgactcccgcgattcccgctaccacctgtgtgacgcggtggagtcgggcgaggtggccggatccgggggattcgtacccatctcagacgtcacggggccgatggtggggatcttcatgcccttcaaccgcgccacgcgcttcgccatccctgcgacattcgcctcggtacccgatcctgccccggcaccggaccagccgacggtgaaccggaagccctgctgagccccatggcgacgtcattgtcggagatcggctatgaacaggccttggccgcctcgggattcggcccggtggcaggcgccgatgaggccggcaggggagcctgcgcgggtccactcgtcgcggcagccgtcatcctctccgaggatccgcaggaccacatcgaggacctccacgattccaagaccctgaccgcacgtcggcgtgaacgcgcctttgaccagatcaaggcccacgccctcagctggtcggtggtgtgcgtgggcccggcagaatgcgaccgcctcgggatgcaggaggcggacctgcagggactgcgtcgcgcgctgttgcgccttgatccttcgccgggcttcgcgctgaccgatggctttgcggtggcgggtctgcccgttcccgggctgggcatgtggaagggcgatcgggtgtgcgcgtgcgtatccgccgcatccatcgtggccaaggtcacccgcgatcgactcatggtcagggcggcccaacaatttcccggctatggattcgagatccacaagggctatgcgaccaagctccaccaggagagactggaggcgctcggccccagcgccatccaccggcgcagctacgcgaatgtccggcgagcggctaggctgaacgaatcatgagcagcgccgacgatcttgatgcctacgagagcaaacttgagctcgatctttaccgcgagtacaaggatgtcgtcaacatcttcaagtacgccgtggagactgagcgccgcttctacctgtgcaatgcagtcgacctgaaggtccgcaccgagggtggcgacgtctactacgaggtctccatgagcgacgcctggatctgggacatgtaccgcccgagcaggttcgtgaaatctgccaaggtcctcaccttccgcgatgtgtcgattgaagagatccagcacaccgacctcgaggtgcccgagggggagtagcccccgagcaccatgccgggcggcccgtgaggtcgcgcgagctattggccgtcccaccaccgcggtggatgcccgccagtgccctgcgggatacctgtggatgggcgactgatcaccgctgatgcgcccacaccccctgtggaggtgatggccatgagcactctggtcacaggacgatatggcgaggacctcgccgctgaatacctgcgcggactcggctggaccatcgttgatcgcaattggcggtgcggctccggcgagctcgacatcgtggcgtacgaacccgtcgaacgaacccacacgaccgtcttcgtggaggtgaaataccgcaccggtcgaggctttggtgatccattggaggcgatcaccgcaacgaagcggcgccatctgcgggccagttgcgcccagtggttggctgagcacggccccaccggggtggtgcgcatcgacgcgatcggcatcgtcgggatgcgcgggagcgcgccggtcctccgtcacctcagggggctggcatgaccacggcatccgcatggtcaatggccctggtgggcatgagggggaccgccgtcgaggtcgaggcagcgcttggtgccggccttccacgtaccgtcctggtgggccttcccgatgctgccctgtacgaggctcgcgaccggtgcaaggccgcggttgccggtgcgggactgagctggcccgacagactgctcaccatcaacctgactccggccagcctgccgaaggcgggcagccactacgaccttgcgatcgtggcagccgtgcttgccagcgcgcggctcgtgcccgccgaaccggcagccaggacggtcttcatgggcgagctcggcctcgacgggcgcgtccgggccgtgcgcggcatcctgcccgccctgctggcggcgcgcagccacgggttgaccaccgccgtcgtgccctccgaacaactcggtgaggccgagctcgtcgaggggctcaccgtctgggcggtcgcagacctggcagagcttgtcgaggtcctcaacggtcggccggtgtgcggtaggcccgtcccggcggtggccccgacgacgccggacgaggagcaagcacccgacctggccgacgtggaggggcagcagtcggcgcgctgggccctcgaggtggctgccgcgggtggccaccatctgttcatgcatggccccccgggcacgggcaagacaatgctggccaagcgactgcccgggctgctgcccgacctcgatgactcccaggcgctggagatctcggcgatccattcactggccggtcatgatctgcacgacaggttgatccgcaggccaccgttcgccgatccgcatcacaccgccaccgtcgctgccatggtcgggggaggggctcgcatcccccgccccggggccatctccctggcccatcggggcgtgctcttcctcgatgaggcacccgagttcgggacctctgtgctggaagccctgcgaacgcccctggaatcgggcgtcgtctcgatcgcgcgcagcggtgcgacggtgagctatccggcccgcttccagctcgtgctcgcagccaatccgtgtccctgcggccactacggggtcccggactcccactgcacctgcgcgcccatgatggtgcgtcgatactctcagcgcctgtccgggccgatccttgatcgcgtcgacatccacgtcgccatgaccagctccggggcatcccgcctcaggcgcaccgcgggtccggcacccgagagctcatcggtggttcgcgcccgggtgctggaggccagggatcgccagcggcgacgactggcgaacacaccttggcggacgaacgttgaggtccccggcgcccaattgcggaagaccccgccgccaccggccgggctggatctgatcgacgattgcatcgcaaggggacggctgagcgcccggggagtggacaaggtgttgcgggtggcatggacgttggccgaccttgccggccgcgacaagccgtgtgcggacgacatcgcctcggccatgggactgcggcaggtcgagacgatgggtggtgcggcatgagcgggcgttggtcgggtgagcgccgggcacgggctgccctcacgttcatttgtgaagccggaaagccggacctggcgcagctggttcgccaacagggggccgaggaggtgtggcagtcgctgctggcaagtcaggagcagggcgcgtggcccaagcgggcgcggcgccttgagatcgaccagctcctggcggcggccgaacgctgcggggcccgactgatcatgccgggcgatggggaatggcccgagcgcctggacggtctcgaccatgtcgagccgttgaacggcatggccggaagcccgatcgccctgtgggccgtggggccgcgggatctcggcgaactgtgccagtcgcgactgcccgcggtcgccatcgtgggtgcgcgggcggctacgcattacgggtgtgattcggccaatgaactcgctgcgcaattggccgggcagttccccgtgatcagtgggggtgcctacggcatcgatgctgcggcgcatcggggggcgttgtcggtgggcgggcccactgtggcggtcatggcgggcgggctggacgggtggtatccgcggggcaacagccggttgctggaccagatcgcgggtgagtgcgtggtcgtcaccgagatcccgcccggcatccgccccaccagacagggcttcctggcccggaacaggctgattgccgcgctctccgggggcacactcgtggtcgaggcagcggcccgatcaggggccctgaacacggcgagctggtccctgcggctgggaaggccattgatggcggtgccgggaccgatcaactccgcactcagcgagtcgccccatcggctcatccgggaccacgaggcggcattggtggccgacgcaaatgacgcgggtgccctgctcacaccggtcggcgaacacgtggaattgcccggcgtcaaggcagtgcgggaattggatgggcttgatcccgaattggcagcggtgcgtgaggcgatgccgagcaggggggatatcgacctggattcactgagcgttgcctcaggacgatcggctgcgcagtgcgcagctgcgctcatccgcctcgacatgcggggcctggtgcagcagacgggtccgcaacactggaggatccgtcggccccgacaccccgccggggccccggcaggtggatagtgccgcggtggccgaaccacctcggtatcgtgaacgttcacgggacgcggacacgttctcctcccgggaggatgtcgtcacccaagccggacacctgccgtgttggggggggcggtgacgtcccatggcaatgaccacgacagaagaccggaggcaaccacagtgagccagaacccaggcccttcatccgacgcgacatccgaggtcctgcacacactcgggacagccgtgccgtccacggttccgacccgctggtacaacctcaatgcggatttccccgagcccatgccgccggccctgaacccggccaccgatgagccggtgacggctgacgatctggcgcccctgttcgccgaggagctcatcgcccaggaggtgagcacgcagcgctatatcgacattccccaggcaatccgtgaggtctacgcactgtggcggccgagccccctcgtgcgtgcccgtcggctggagagggaacttggcacgaaggccaagatctactacaagtacgagggggtcagccccaccggctcgcacaagccgaacaccgcggtggcgcaggccttctacaacaaggcccagaggatctccaagctcaccaccgagaccggagccggccagtggggagcctccctggccttcgcctgtgcgttgttcgacatggtcgccgaggtgtggcaggtgcgggcctcctacgacgccaagccctaccggcgctaccagatggaggtctacggctcgagctgccatccgtcgccctccgacctcacggcctcggggcgcgaactgctcgaccggatgcccgacaccaccggatcgttgggcatggccatcagcgaagctgttgaggtggctgcgggcgatccgagcgcccactacgccctgggcagtgtgctcaaccacgtgatgatccaccagagcgtcatcggtgaggaactgcttgagcagctggcggcggcgggggaggaacaggctgacatcgtcttcgcctgcgccggcggcggctccaacctggccggcatcaccttccccctgatcggccagaacctgcgggagggcacgacgaccaggttcatggcctgcgagcccgaggcggcaccctcgatcacgaagggcgaataccgctacgacttcggcgacgtcgccgggctcaccccgaagctcatgatgtacaccctgggaaccgacttcgtcccgccagcgatccacgccggcggactgcgctaccacgggatgagcccgatggtgtcccacgcggtgcacctggggctgatgggggcaacggccatcgaccaggacacctccttcagggctggtgttctcttcgcgtgcagtgagggaatcatcccggcgcccgaatcgacccacgcgattgccggagccctcgactatgtgacgacctcggcgcgacccgacgaggtcgtggtgatcggggtatcgggaaatggcgtgctcgacctgccggcctacgaaggtagggtctgaccatgacaactgagaacgtgaatggcctcggccgtcaggtggtggccattccggtcacccctaccggtgatgttgagccacgcttcggccgtgcccccgaaatggcgatcgccaccgtcgaggatggtgccatcaccgactggcgcaccgagcaggtcggttgggacgtcctccatgaccagagcgagcatggccagcatcacgcccggatcgtgcgcttcatgcgtgacaactcggtgacggttgcggccgccggccacatgggtcctcccatggtcaacaccctgggcaagctcggcctcgcggtcgttgtcggcgtgccggagatgcccgcccgcgacgcagtgctggccgtggtcaagcggcttgagtcggaagacgacaagtaggcagcaggcagaaacgcacgagggggaccgcacggccgtgcggtccccctcgtgcgttctgttcgaggcgtcaggcagccacgacgcccatcatgatgaggacgatgatcactgcggccaggatgatgcggtagacgatgaaccccgtgaaggaattcttggacacgaagcgcagcaaccaggcgatggacacataggcgaccaccagcgacacgaccgtcgccacggccgtgggtagccaacccacctgggccgaaatggcccccgcctggctgatggcctccatgccgccggcagccaccagcgcggggattcccaggaagaagctcagcttggttgccgagacacgatccatcccccggaacaggccggccgaaatcgtcgcgcccgaacgcgagatgcccggaaatacgggggccagggcctggaacagcccgatgatgagcccgtccttccacgtcacgtccaccatggtgcgctcgccatggtcacgcctgtcggcgatggccatgacgatgctccagaccagcagcgccccgacaatgacccacagggaacgagtggtcgtctcgatcgcgttcttgaatgccaggcccaccacggccaccgggatggatcccagaatcactgcccagcccatccggtagttcgggtcatcccgcttgtcggcatggacgatcccgcgacaccaggccaccacgatggcgacgatgtccttccagaagaagaggatggcggcaatgatcgcccccacctggatgaccgccgtgaacgcggtcatgccgggggagtcgatctggtagccgaggagcttttcgacgatgttcaggtggccggtactggacaccggaaggaactcggtgattccctcgacgatgcccaggagaatggcgtggagaaggttcatgtgcgctctctgctcgcaggcgcggctggggccatgctcgagccgcagccatcctgacagccacctaggctagccgtgtgctgcgccgcgttgacgcagtgatcggcgtgccgcactgatatcggtccgcaggccgatgcaatgtcgccatcgccagaccggcggtccatcccggtgcccccggttggcgtgatgtgggtcgcgtcccggccccggtgagccgggcaccggttgagcaccatgcaccgcaggcgtgcgacatctggcacggattggagtcccgcgttgcgtgccctcaggcacgaaaaacccctctgacgaggcatttcaccttgtcagaggggtgttacgcattgtttccgagagaggacgtgaaccttcccgcagagtgcccatgacaaggggaaacgtggctgggattatgtttcgtgccagacggggaccgccgggagcggcttcggtgattatcgctcaggggctagctagtctctgtctggacgtgaggcacggactatcacttgtacgtctgcgccccggtcgcggcagccaggtcggaggcttgggctgcggggacgagtgcataccagttagcgccgatgatcattttcagggaagagtactggtctgaaccgaccagcctcttgaacagatctcggttgccttcgtacaagcggtcccaggaggcttctccaggatcgccgttcactacgagacggatgttgccggaacaggtcccggctaagccggattccagtgtctcgtgccagccggtgcaggccaggccggatgcggtgagcttgttgcgtaggtcgctgggagatgtggcagtcagggtggtcgttgaggctggccgggtcgttacgttcggggtcgctgaatgggaggcgcttgcggtagtaggagtgcttgagctcggggtggatgcgggtgtgctgccgtcattggatccgcaggcggtgagcagcaacggtgctgcggcgaccagggcgaggattcggtgggcgtgcttcatgtcgggagtccttcgagttggtgggtactgacgtgacagaacctggtcagatcttgagtcggatcctcttgaccaggcgtcccgctcccatgccgatcaacacgaatccgccaatgaccatcaggccagcgaccaggccgccgccgccggctcccgcaatgccaacgcatagggcgagaaggatgattccgaaggcgaagtgaccgacgatggttgaaacgctcggccggttgtaggccccccgctggatgtctgccagcagcctggttctgcgtgcctcgtgttcggctgggctcagctgaccggcggcgtatttggcgtcgaggtgttcgaggagcttggcggcgatgtcgggttcgttggtggccatgggggagtccttcggatcggcgggtgtcttgtcaggaatctatcgggggcctgtgacagtttcagggacctgcgaggttcttctcgatccacgcccgctcaggcggatgaaggtgctcgatgcgcaccttcatcacgtcgtcggtgacccacagcacgtcgaacgtggtttgtgccagcggtctgcgggtgcggctggcgcgcgctggatgaccttctcgatccatgtcccgacgcacgtgcacttgggtttcgcggcccggatctttggcgcggcccacactcccagggagatgaggtcttcctcggcggcgagccagcgttctgggtcctgtttcctggttaaggtcatggggccttgtggacgccaaggtcgggggcggtgtagcgggcctagtactttcccgacggcagcgtcctgatggagccgaatccacgtcgtcccatgggtcggcctcctcggttttcgtgccagtgacgtgccgcacacgtgccagatgtcggcatatcggagcgtccgtcagcggccgcacgggcacgagagaggcatgaaaaaccctctccgactaggtgcttccccttgtcagagagggtttcaacgatggtgtccgagagaggacttgaacctccatgccctataacgggcactagcacctcaagctagcgcgtctacctattccgccacccggacactgtgtgcagtttcctgcaacgccccaaaaccatagcattccttggctcgcgcgcgcgagcgcgtgcatccgtgtccgccctgcacgcgtgtacgcgtgcaaccgtgtccgagctgtcatcgccacggcgtgggcgttgtgaacgcggcgctatcatcgcgtgcaccggcgaatccgatccgatcgaccggtaccggtgaacagggagaagccatggattacctgcccagctcgtggatcgcgtccaccaggctccggaggcgagagcgttccggtgtcgaaacggaggagcagtgcctcaggctgacgcgtgaggtcacccgcaaccaggtgcgtcgcctgttgaccgagcaggctgagcatgacgggtgggaactggcccggctgaggcggtaccgcgatggttcgcgcgaggtgtggttgcgcaggaaggtcatccgggcccggttgaccgcactcgtgtagtcgcccccacaggcggctcaggcgtcggcgtcgacccgatgtgcaggcgcccgcccctgattgggtccgcccgtgatgtcatccagggccgcaatgattggttcgggcaggcgtacgtcgtcgagtcccaggtaggcctgcaactgttcggtggtgcgagcgcccaacaacggcgcggtcacaccgggtgcgtcgcgcacccacaggagcgcgacctgggccggtgtcaggcccaatccctcggcagcacgtgccacgccgtcggtgacggcccggctccgctcttccaggtagggctccacgaaccagctgaagtgcttgcggccaccccgggaatcgcgtggcgtgccagtgcggtacttgccggtcagcacaccgcgtccgatgggggaccaggcgaacaggcccatctcgtggtgcttcagggcggggaccacctcgatctccgcccgacgggccagcagtgaatactccacctgggcgctgaccagccgattgcggtcggggacggcctcctgccatgtggcggcagtgccgatctgccagccgatgtaattgcacacccccacatagcgggccatcccggagcggacggcctggtcaagggccgccagggtctcgtccaggggtgtgtcgctccaggcatggacctgccacaggtcgacgtggtcggtgcgcaggcggcgcagcgatcccgcaaggtcgttgagcatggccttgcgggaggtgtcgatgacctggtgaccgtcgcgcaccccgaaacccgccttcgtggcgagtaccacgtcttcccggttcagtgtcgtgcgcatgatccgacccagcatctgctcggccgctccgcccccgtatgcgggggccgtgtcgaccagggttccccccgcgcccacgaaggtggtcaccagatctgtggcggtggggaggtcggtgtcgccaccccatgtcatcgtgccaaggcccagctggctcacctcgagaccgctggcgccgacccgccgggtgcgcatctggcccctttccacgaacgaccactgtttccgaaagcctagtgcgggccgagtaggtttggcctcatgcaagcctggcccacggtggaagtcccgacgatccctgcgagtccgagcgaccagaaggtgcctgaacgccttgtcatggtcacgacgaacaaccgcagagcggtaccgatcggaccggcagacggtgatgccggtctctatgtgtgcggtatcaccccctacgatgcgacgcatatggggcatgccttcacctatgtgatgtttgatgtcctcgaccgggtctggcgtgacctcggcctcaacgtgcgctatgcgcagaatgtcaccgacgtcgatgatccgctgctggagcgggcacgggccacgggggttgactggcgcgagctcgccagcgaccagacccagctcttccgcgacgacatggagtccctgcgggtactgcctccccgctggtacgtgccggcaacctcgatcatcgatgaggtcgttgagctcatcgaacggctgcgccaacagggcaccatctatcaggttgatgatccgcagtatcccgattggtatttcgaggtgggcaaggcacccggcttcggtaccgagagtcatctcagccggcaggacatgatctcggagttcgccgagcacgggggcgatccggaacgtcccggcaagcgtgacgccctggactgcctggtatggcgcatggaacgtcctggggagccggcctgggactcgcggctgggacgcggcaggccgggctggcacatcgaatgcaccgccacggcgctgaaccggttgggcgaggacttcgccgtgcagggaggtgggcgcgatctcgcgttcccccaccacgagatgtgtgcggccgaagcgatcgtcgcgaccggcaagcccttcgccgaggcgtacatccatgtcggcatggtgggtctggacggcgagaagatgagcaagtcgctcggcaacctggtgctggtcagcaagctgcgcgcccagggcgttgatcccatggccatccggctcgcgctgttggcgcacggctacgcctccgactggtcgtggacacaggccgggctggatgatgcgcagcgtcgccttgacgcgtggcgtgccgccacgcgggcctcctcgggcaccgacgcggtgccggtcatcgcggacattcgccgcgccctgcgggagggcctcgatacgcccacggcgctggcggtcgtcgatgaatggagttcggcagtcctggcgggcgacggagacgacctggccgcgccgcagcagatctcacaggccgtggacgccctgctgggcatccggttgtagcgccaaccccgcaaagggacagatggaggggccccggaccaactggtccggggcccctccatctgatggtccggtgtcacccgtcaccgtgcgcgggccggtcagtccctcaactcgaggggcttccctgtggcggtccccacaggctcgacggtggggtgggccctgccggggccgcggtgccggagtcgtcaggaggggtatcgggtggcggtgcgggggcggccggcgaggcctcggcgcccgagaggttcgagtcatcgcggggacgatcgatgcctgcggccgcatagacctcgttctcgtccagggtctccttctcgaggagcttggtggcgatggagtccaactgggcccggtgctccttgagcagcctgaccgccttgtcctggcattccccgatgatcctgcggacctcaccatcgaccgtcgacagcgtctcgtcgctgatcccgatctggcgcgggtcggcatcgtcgggaaggaccatgaccgggccgaccttctcgctcatgccccacttgcccaccatctggcgggcaatggcggtggcctgcttgaggtcggattcggcgccggtggtgaccacgccgaagatcgcattctcggcggccatgccacccaatgcccccacgatgcgtcccaacaggtactgctcgtcatagccgtacttgtcggtgtcgggggtcgacagcgtgacgcccaacgcctggccgcgcggaatgatcgagaccttgcgcaccgggtcggcacccttctggagcatgccgagcagggcatgcccggactcgtggtaggcggtgcggagtcgctcatcgtcaggaatgaccaccgagcgggccacgccgagctggatctgttccagggcattggtgaaatcgcgttggtacacctgggtgtcgttgcggcttgcagcctgcagggcggcctcattggccaggttcgccagatcggcgcccgtcatgcccggcgtggaggcggccaattggtcgaggttcacgtccttggcggtcgggatctcgcgggtgtgcacccgcaggatcgcggcccgtcccttctggtcgggcgggctgacggtgatgacacggtcaaagcggccgggacgggtcagcgccgggtccagcacatcggcgcggttggtggccgccatcacgacgaccccctcggtgccgtcgaagccatccatctcggtgaggatctggttcagggtctgctcgcgctcgtcattgccacccagggagcggttggacgccctcgagcgtccgatcgcgtcgatctcgtcaatgaagatgatggcgggcgcggccttccgggcctcctcgaacagctggcgcacacgctgggcaccgacaccgacgatcatctcgatgaactcgctggcagacgcactgaagaagggaacctcggcctcgccggcggttgccctggccagcagggtcttaccggttccgggctcgccctccagcagcactcccttcggggctcgcgcccccaccttgcggtacttgtcgggattgcgcaggaagtcgacgatctgtcggacctcgtcctccacctcgtcgataccggcaacgtcggagaagttgacccgtacggtgtccttctcgacgggcttgacatcacgtttcaggcccaggccccccatgccgccgcccttgctcatgcggttcatgaaccacacgtagacgccgatgatcaggatccagggcacgaaggcgaccagcaggctcacccacggactcgtctggttgaccagcgagacggccgacacggtgacactgtgctggttgagctcggtcagcaggtcgtcgttcgcccatgtgggccgctcggtggtgaacttggtgtagctctcacccttcttggtctctgaggtgtccggtgcgatggcggcctttttgagcacgccgtcgatcgaatcgcccttggcgtgtaccgactgcacgttgtcggccttcacttgggtgatgaactcgttgtaactgatcgtcgggggtgcctgcaccgcgttgaaccagttgatgccgatgaagaacaacagcagcaggatcagccacggaacgaagcgcatccacaaggggcgcttgggccggtccccgtccgatggtttcttcggcaggccctcggtatgccacggcttgggggagtcgagtggaggaggcccctggggtgcctcactgcgccaattcttgggcgcgtcctgctcacggttggtgtcctgatcgggcacgtcatccgtgtgcgctggtcgtctggccatggatacctcctggtattcatcaccgatcctaaacgccaccaccaacgcgttcccaccagcgatttcgtttggcccccacgagcaggcccgcggcggtgtccggcttcgtcggcgtgcgcgatcgtggtgataccgagcagccccggcaggcccctgcactaggcttgggcgcgtgagcaagtcctttgaccaattgttcgacgagctgaccaagatcgccgccgaacgtcctgccggttccggcaccgtcgccaaacttgacgagggcgtacacgccatcggcaagaaggtggttgaggaagccgccgaggtctggatggcgtccgagtacgagacgcttgacatggcggccgaggagatcagccagctgctctactggtgccaggtgatgatggtgaagaagggcctgtccctcgaggacgtctaccgccacctgtgagccacgcggcccccgctccaaggggcatccgggaaagcccaccatgcaccgttctaaggattcctgatgagtgacgagaactacgtgaagatcgccgtgcccaacaagggctcgctgtcggaggccgccgcgcagatgctgcgcgaggcgggctatgcgcagcgcaccgactccaaggagctcgtgctcctcgacgaggccaacggggtcgagttctattacctgcgtccgcgcgatatcgcggtgtacgtgggtgaggggaccctcgacctgggcatcaccgggcgcgacatgctgatcgattccggcgctgccgcgaccgagatcctgccgctcggcttcgggcgcagtcgcttccgtttcgccgccccccgcggtgccgtgcccggtgtggccggcctcgagggcaagaggatcgccaccagctacccgggcctgctgcgtcgttacctggaccagcacggcctcaccgcgaagctggtgcacctggacggtgccgtggagtcgagcatcgccctgggcgtggcggacgccattgccgatgtcgtgcagaccggcaccaccctgcgcaaggcgggtctggcgctcttcggcgacgcgatccttgagtccgagggaatcctcatccgccgcagcgagggggagctcgacgagacggccctggaccacctcacccggcgtctttccagcgtcctggtggcgcgcagctatgtgatcatggattacgactgcccctccgagatccttgaccaggcaagtgccctgacccccggcttcgaatcgccgactgtctcgccgctcgcgcgggagggatgggtggcggtgcgttccatggtgcccagttccgaggcccaacgactcatggatgacctgtgggatctgggcgcgcgggccatcctggtgaccgaggtcgcggcctgccggctgtagtcagcgtccccgtgtggcggggcgatgcgcggcggacccggtcggggcaccgcgcccggtccgtcagtggatgccgtggttcttcaggatcgcggtgatctcagcgtcttcgtcggggtcatccagtcccgcgccggggcccgccgcctgccccgagggtgcggtggccgcagccccggtgaccggctgctgtgcggattggggtgcgagcagggcctcgcgtcgacgtcggccctccgcccttcccaccggttccagggccgaggagatgaggaagaccacgactccggcggcggcgatcccgatcccggtccacatacgtgtgtcaaggtgctgatcgcgcacccagtgccagatgccccgagcggcatcggccagcaacgacaggatgcccgtcacccacagccctgcggacagcaggcccaggctcaatcctcgtagcacggtgcgcatactgcggcgtcggcgccaacccaggaaggcgaccagcaggccgaccagcacgaggacgatggcgacgatcagggccagtgtcgtgggactcatggctcaagacttgcacatcgatgccgcggggcctcgcccgggcagcaggtaccgtcggggccctggcacgcggcaattcggtttcgacgccgtgacgagctaaactagttgagttgatcgacgtcgcacgacggacgatcccacaagtggaggcctggactcccaccttgttcggctcagtcgatgctccgatggagcgtcacgtgagcagccgaccgggtcagtacgatggagcggatgaccggccagcccggttctccgtgatgcgtttctgaggccttcacccgcgggtgagggcctttttcgtgcggtgcaccacattggccacatcattggaggacataatcagcaacgaactccgcatcaacgagcggatccgggtacccgaagtccgcctcgtcggacccaacggggagcagatcggcattgttcgcctcgagcaggcgctgcagcttgcccgcgaacatgatctcgacctggtcgaggttgctcccggggcacgtcccccggtctgcaagctcatggactacggcaagttcaagtacgagaatgcgcagaaggcccgcgaatcgcggcgcaaccagtcgaacaccgtcatcaaagagatgaagcttcgcccgaagatcgacggacacgactacgagacgaagaagggccatgtcgtgcgcttcctgcgcggcggcgacaaggtcaagatcaccatcatgttccggggccgcgagcagtcgcgacccgagttgggcttcaacctgctgcgccgcctggccgaggacgtcagcgacgacggtgttgtcgagcagtccccgaagcaggaggggcgcaatatgcatatggtgttgtcgcccacccgcaagaagagcgatgcccgcgccgaccacgaggttgaacgggcccgcaagcaggcagagcgccaggcagaggcggccgccgaaaaggctgaggaagcacgcctgcgcgaggccagcaagaaggaaaccaagccgaagaagaagcgcggcccggctgacaacatggatccggatatcgacgtctgagtcgaaccgaagtcactgacagaccagccgtccggcaccccggacggtcaaccgaatggagcgagatatgcccaagatgaagacgcactccggtgcgaagaagcgtttccggatcaccggcaccggcaaggtcatgcatgcccgcgccggcaaggcgcacctgaacgagcacaagcccaccaagcagactcgccgcctgggccaggacgccgtgttgaccaagcccgacgccaagaaggcccgcaagctgctcggtaagtgaccgacgccttccaccactgattttcaataagcaaggagtacgaccatggcacgcgtcaagcgcgcagtgaatgcgcataagaagcgtcgtgagattctggattcagcctcgggttaccgcggccagcgttcgcgtctgtaccgcaaggccaaggagcaggtgctgcattcggccacctactcgttccgcgaccgcaaggctcgcaagggcgatttccgctcgctgtggatccagcggatcaatgcggcgtgccgtgccgagggcatgacctacaaccgcttcatcaatgggctgaagaatgccggcgttgaggttgatcgcaagatgctcgccgacctggccgtctttgattccgacgcttttgccgcactggtgaaggtggccaaggacaaccagccggccgccaaggctgcctgagcggatcagcatggcgcagttcgccaaccacgagccgaacgcaagcctcccggagatctccggggagtccttgcgttcggctcgtcggttgttacagcacaagcatcgtgccgagaccggcttcttcctggccgagggtgcccaggccgtccgcgaggcactgaggtccccgggggccgttgacaccctcgtggttgatgacccggcacggcatcaggagctggtcgacctcgccctggacgatggccagctcattgacgtggtgcagggcagcagcgccgacctggcgagcctgtccgacacgaagaccccccagggaatcatcgcggtctgtcactggtcgggctcccggttcgaggacatcgcggagccgcggttggtggtgatctgcgcccaggtgcgagatccgggcaatgcggggaccgtggtgcggtgcgcggatgccttcggggcggatgcggtggtgctgacccacggctccgtcgacatcaccaaccccaagacggtgcgggcctcggtggggagcatcttccacctcccgatcatctccggggtggagttgaccggggcgatcgagtgggcgcatgccagtgggctccaggtgcttgccgcggacggttccgggcaaccggtggacctcatggccggggccggtcagctggggcagcccacggcgtggctgatgggcaatgaggcatggggactgccgcgccacgatcttgagctcgccgatcgcgtggccgccgtgcccatgtggggtgccgcagagagcctgaacctgtccacggccgccgccatctgcctctatgccactgcgagcgcccagcgtcgcgcacccgaacagcagccgaatccggaggggtcccactgatggccatcgtggtcaacgtcgtgatcattgtcctgatgctcgcctccgtggtgtgcgcgggcatcttcctcctgctgggacgtcgggcccgcctgcgggggcgaggtgatccgcgagggactggtgccgggcagcgcgacccggcgcatcccgatcaggccagcccccacgactgaggatcaccgggctaacgcacaattgccatgaccggccacgcgggctgcgccgcgatacggaatcgcgtggttgggtgcgtcctcctagactggaaaggtacgtccgcgccgacccgagtgggcacgcggtgatgagccagatgcgaggagagcccatgtcggggccacaggacactgcccaaccgctcgacgccgctgacgtcgaggccatggttgatgcggcgatcaaggcgatcgctgctgcgaaggattcagcgcaattgaagcaggcgcgggcggcacatgccgccgacaagtcgccgctggccctggccaaccgccggatcggttcaatgccgaaggaccagcgcaagaccgccggcgccctgatcggtcaggcacgcggccgtgtcaacaaggcactgaaggagcgggccgagcagatcgctgacagtgagctcgccgcccagctcgagtccgagcgggtcgacgtgaccctgccggtgcgcgagcacccggtcggtgcccgccatccgctgacggcgctcatcgacgacatgtgcgatgtcttcatcgccatggggtgggaggtcgccgagggccccgagctggaggccgaatggctcaacttcgacgccctcaacttcacgcccgaccatccggcccggttcatgtcggacaccctgttcgtggagccggcgagcgatcacaagctgatgcgcacccagaccagcccggtgcaggtgcgcgccctgctgcagcgcgagctccccatctacgtggtgagcccgggcaaggtctttcgtgccgacgaatacgacgccacccacctgccggtgttccaccagctcgagggcctggccgtcgacaagggcatcaccatgggtcacctcaagggcaccctcgaccacctggcgaaggccatgttcggcgacatccgcacgcgcctgcgtccccactatttcccgttcactgagcccagcgccgaggtcgacctcgaatgcttcgtctgtcatggcgcatcggtgggcaaccccgaccgtccctgccggacgtgcaagtccgagggctggatcgaatggggtggctgcggaatcgtcaatccccgcgtgctcaaggccgccggcatcgataccgacgtctattccggattcgccttcggcatgggagtcgatcgcaccgtcatgttccgcaacaacgcgcccgacctgcgtgacttcgtcgagggcgacgttcgtttcagccgttcgttggtaggaggagcacgatgaaggcaccgattagttggttgcgatccctggttgagctgccccatggcgtcaccacccagcagcttgccgacgcgttcacgcgcaccggcctgcaggtggagcacatcgaactcatgggcaaccaggtcaccggtccggtcgtggtgggtcgggtggtgagcttcgtcgaggagccccagaagaacggcaagaccatccgttggtgccatgtggactgtggagagcagttcaacatcaccgatgagaaccccgacgtcaccgacggacgcggcatcatctgtggggccgacaacttcgcccagggcgactacgtggtggtggcactgcccggtgccgagttgcccggcgggttcaagatctcgtcgcgacgtacctatggacacgtctccgacgggatgatctgcgctgccgatgagctcggtatcggggaggaccacaccggcatcatcgtgttgcccgccaatgaggcctcccgggccggactgggctccgaggcgatggccctgctcggcgtgcccgacgagatcctggacattgatgtcacccccgacatgagctattgcctgtcgatgaggggcctgtcccgcgaagcggcgcaggcgttcgatgtgccctacaacgacatctactcccgccgcgttcccgagcccagccagggtgcctacccggtgcgtgtcgaatcggacgactgtgagttgttcgttgacctggtcgtccacgacatcaacgccctcgccccgactccgacgtggatgcgccaccgcctggaggccagtggcatgcgctccatcagcctgccggtcgacatcaccaactatgtgatgctcgagtccggccagccgctgcacgcctacgacgccgaccagctgttgggccccatcgtggtgcgcaaggcccatcagggggagcgcctcaccaccctggacagcgtcgatcgcgagctgagtgccgaagatctgttgatcaccgacgattcgggccccatcggcctggctggtgtcatgggcggcctcaacaccgagttgagtgactcgacccgcaatgtggtcatcgaggcggcgcacttctcacccggcaccatcggtcgtacctaccgcctgcacaagttgccgtcggaggcctcgaagcgcttcgagcgcgataccgatatcggcgtgtgctgtgcagctgcccggatggcggcgcgactgttggtcgaactggcggggggcaccatcgccgacggtgccactgtcgtgggccgcgtgccccagatgcccgggcagtcgatcgacatcgggctgccggccagaatcctcggcgcccgcatcgagcccgaccaggtattgagcgtcttcaagggatccgacatcgaggtgaccaggcgtggcgagcggctgtccctggtgccgcccacctggcgcaccgatctcgtggacccctacgactacgtggaggaggtcggacgcaagctcagcctcgaagtggtcaatgcggtcgtgccgcgggccgaggccggacaggggctgaccgccgtccagaagtcacgccgggcggttctcaacgcgattgctgaggcgggcttcgtcgaggtcgtcaccctgcccttcgtgggcaccgacgacattgaccggctcgggctgccggcccaggccgatcagcatcggctggtgaagctggccaatcccttgtcggacgcccagccctatgtgcgcaccaccctgctccccggactgttcgcggccatcaaccgcaacacctcacgcggtatggatgatgtggcgctgttcgagcagggttcggtcttcctcggtggcgaattgcccccggctcccatgccggatgtgtcccaccgccccagcgatgccgagattgatgccctgctgaactccctgcccgaccagccccacatgctctcggcagtgctggccggcaattggttgcctgccaggtggaacggcccggccgagccggtggactggacgcatgcggtgctgttcgcgcagacggcggccgatgcagtcggcctgcgcctgatccgctcgcaggccgagatcatgccctggcatcccggccggtgcgctgagctgtccattcgcaactccgacggtgacctggtcagcctgggtgctgccggggagctgcatccccgcgtgattgaagcatgcgggctgccggcccgcagctgcgccgtggagatcaacctggatgtgctgttggccaacgccccgaccggcggtgaggttcacgagttgtcgccctacccgctcaccaaggaggatgtcgccctcatcgtcgatgacacggtcgctgcggcggatgtcgaagaggtcctccgcacgggggccggtccgctgctcgagtcaattgccttgttcgatatctacagcggcgagcagaccggacagggtaagaagtccctggcattcagcctgcgcttcggtagcccggagcgcaccctgacccagtcggaggccgcccaggcccgcggcaatgcgctcgcggcggcggtcagtgagctgggagcccaggcgcggcaggcctgacggccggctgctgcttgccgggtcccgaatgggcccggcaaaacgaagagacgacaacctgaagaaggggggtccgggctttagcccggaccccccttcttcctacgtcaagcagcctcccggcccattagtcgcggcgggtctcctcgcagtactccgccagccgtcccagcgcctcacgcaatacggcgtcctcgggtagtgccaccagcctgaaatggtccggattcggccagttgaagccccgaccatggctgatcaggatcttcttctcgcgcaggagaccgagcgcccagtcctcgtcgtcggtgatcgggtagcgctcggggtcgagctgcgggaacaagtagagggccccggcggccggcacgcagttcacgccgggaatctggtccaacaggtcatgggaaaggcgcagctgttcttcaaagcgtccgccgggagcggtcagctcgtcgatcgactggtaacccgaaaggcacgcctcgatcgcgtactgggcgggcacattcgcacacatgcgcatattcgccagcaggtccacgccctcaagcaggttgtgggcccgctgcagtggcccggtgaagaccacccaccccgcccggaagccgcacgcccggtatgcctttgacagccccgaataggtcaggcacagcacatcatcgccggtctcatgggccgtataggtgtgcgtgccgtgatagatgatcttctcgtagatctcgtcggacaacacgatgagatcgtgctcgcgcgccagctggacgatggcccgcaccgtgtccgcggagtagaccgccccggtcgggttgttcgggttgatgagcacgattgccttggtgcgtgccgtgatgtgcgcggcgatgtcgtccggatcgggattccagccgcgtgtctcgtcgcacaagtagtgcaccgccttgccatcgcacagggtgatctgggcggtccacaagggatagtcgggcgccgggacgagaacctcgtcgcggtggttgaggatggccgacagggtcagtgagatcaattcgctgaccccattgccgatgagcacctgctggggatccacgtcaaggtgcttcgattggtagtactcggcgacggctgcccgtgcggacggcacaccgcgtgcgtccgaatagccctcggattcgggcaggtgcgtggccacgctgcggaccacggaatcgggggttgcgaatccgaagggggcgaggttgccgatgttgagcttcaggatgtgctcgccacgagcctccatcgcctgggcttcaaccatgttcttgccgcgtacgtcatagcgcacgccctgtaggcgagtcgcctgatggaactctgtcatgaactacttcccttcgagtcgccatcaaacactaatgaggccgggaatccgcaggccatcgcgttcgcgctcggcgtgccggtcagcctgcccgacacgatgtgccccggggagcccgggtcagccgttcgcatatgtatgcgctccgtggcatacttatgcctatgtcgtacacagcagcagtcgccggttgcaccggctatgccgggggagaggtgctccgcctcctggcgggccatcccgagatcgagatcggtgccctgaccgccgggtccaatgccgggaccctcctgggtcagcaccatcccaacctggtgcccctgtacgaccgacccgttctcgagaccaccccggaaaacctggccggtcacgatgtggtcttcctggccctgccgcacggagcgtccaccgagcttgccaagcaactgcccgatgacgtgctggtcgttgattgcggagcagaccaccggctcaccgacgaggcccggtggcagcgcttctacccctcgccgtatgccggcgcatggccctatggcctggccgagcttcccgggcaacgtgaactgctggccaacacgaagcggatcgcggtgccgggctgcttcgtggcgacggtcatcctcgggctgcttccggccatgacccacggcctgaccgacggacacgacatcaccatcgccgctgcgtcggggacgagtggcgccggcaaggcactgaccccgcgcctgctgggtagtgagacgcagggttcagtgagcgcctatggcgtgggtgggatacatcggcacacgcccgagatcctgcagaaccttgaggtgctgggcgccacagatccgaccatcagcttcacgccgctgctggctccgatgtcccgggggatcctcgcggtgatcaccgccccggtcgacacatcagtcagcgccgagcagatcacagcggcctaccacgacgcctacgacgcggagccattcgcccaggtcctgcccgccggggtctggcccgcaagccagaacgtgctgggttccaacagcgtctgcgtcaatgccaccgtcgatccggatgccggacgcatggtcatcgtgtcgacattggacaacctggtgaagggcaccgccggcagtgccgtccaggcgatgaacctggccctggggctcgacgagaccaccgggctcaccacgattggagtagcaccgtgagcgtcaccacccccaggggattccgggccgctggtgtggccgcagggctcaagagcaccggaaagcccgacctcgccgtggtcgtcaacgacggacccgaccagacggcagccgcggtgttcacctcgaaccggttctgcgcagcgcccgtgatctggtcgcgccgggccgtcgcggaccaccgactgcatgcggtggtgctcaattcgggtggcgccaacgcgtgcaccggcgaggccggacttggcgactccgccgagaccgcccaccacctggcagagcagctcggtgtcgatgaccatgacgtcgcggtctgttccaccggcttgattggtgagcgcctgccgatggacaagatcctcaccggcgtcgacgaggcagtcgtggggttgtccggcgagggcggtatggatgcggccaacgccatcatcaccaccgacacccatgccaagacagccgtgttccagggcgatggctggagcattggtggcatggccaagggcgcgggcatgctcgcaccgcaattggccacgatgctcgtggtcatcaccacggacctgtccctcaccgccgatcaggcccgggccgccctgaccgcatccaccgaggtcagcttcaacaggctcgactccgacggctgcatgtccacgaacgactcggtgctcctgctggcgtccggcgcctccggtatcacgcccgacaccgatgagttcacggctgccctggccgagatctgcctcaacctgggacaccagttgctgggtgacgcggagggcagttcgcacgacatcacgatccacgtggtcaatgtggccagcgaacgcgatgccctggtggtgggtcgctcgatcgcggcgagcaacctgttcaagtgcgccatcttcggcaatgatcccaactggggccgcgtcctgtcatcgatgggcaccacggatgccggcttcgagccgagccgggtcgatgtcagtttcaatggcgtgatgttgtgccggggtggcgaaatcggtgacgatcgtgcgttggtcgacctgagcccgagggaatgcacggtggtcgtggacctccatgcgggttcggagcaggccatcgtgtggacgaacgacctgacctacgactatgtcagggaaaacgcggagtactcatcgtgagccgcacgcgcagcctagaccatgacgccgcgattgcgaaggccggcaccctgatcgaggccctgccgtggctggagcagtatgcggggaagatcatcgtcatcaagtacggcggcaacgccatgatcgatgacgagttgaagcatgcctttgcccaggacatcgtgttcctgcgtcgctgtggggtgcggcccgtggtcgtccacggaggtggaccccagatcagtcggatgctcaagcgcctcgatatcaagaccgagttccgcagtgggctgcgcgtcacctcaccggaggcaatggacgtggtgcggatggtgctcgtcgggcaggtgggccgcgagctggtcaatctgatcaatgagcacggacccttcgcggtggggctgtcgggggaggacgcccggctgttcactgcgcgcccgaagacggtgatgatcaatggcaagcccgagcagctcgggcaggtcggggaggtcaccgaggtccgcccggagtcggtgcgcgatctgatcgacgccggaaggatccccgtggtcgccacggtggcgccgggggaccatgagcaggtcttcaacgtgaacgcggacactgccgccgcggcacttgccgtggcactgggggcggagcgcctcgtgatgctgacggatgtggccggcctgtacgcagactggcccaactccgaagacgtgatcacccagatcagcccgggggagctggagcgcctgctgccgcaactggagtcgggcatgaaaccgaagatggaggcctgcctgcgggcggtgcgcggcggagtcagtcgcgcaacggtcatcgacgggcgcgtgcagcactccctgctcctggagatctttacgaatgagggaatcggcacgatggttcgcgccgaggagggaaacaacggtgagtaacggggacgcagcgtccggactgaaccagcaggaatggggcgctcgttacgaccgcaccatcatgaacaccttcggacacccgaagcgagtgctggtgcgcggtgaaggcgcggtggtgtgggacgccgacggcaagcggtatacggatttcctggccggaatcgccgtgaatgcgctgggccacgccaacccggaggtcaatcgcgccgtggcggagcagatgaacaccctcgggcacatctcgaacatctttgcctcgcccacccagattcggctcggtgaggaactcgtggcactcgcctcccgtgagtccgccccgggcacccccgccagggtcttcttcgccaactcgggcactgaggccaatgaggcggccttcaaggccacccgcatgaccggacgcaagaagatcgtcgcgatgatcggctcattccacggtcgctcgatgggttcgttggccatcacctacaacgagcactaccgcaagcccttcgagccccttcccggcgagatcatctggacgccctatggcgatgtggcagcgttggagaaggtcgtcgacgacaccgttgcggccgtcgtgaccgagccgatccagggcgagaacggcgtcatcgaaccgcccgacgacttcctgccggcagtccgaaggatcactgccgagcacggcgccctgatgtggatcgatgaagtgcagacgggcatgggtcggtgcggcgaatggttcgcccaccagcgactcgatgtggtgcccgatctcatctcagtggccaagggcctgggcaatggatttcccatgggggcatgcatcgccctcggccccgcggccgatctgttcggccccggtgaacacggcacgacgttcggtggcaacccggtggcgtgcgcggccggccttgccgtgatcagctacatcaagtcgcacgacctgctcgaccacgtgaagcagatgggactgcggctcgccgacaaggtgatgtcgctggatgacccgcgcattgccacggtgcggggacggggcctgttgcgcggcattgtcctgacgaagccgctcggggccgaggctgctgcggccgccctggaggccggctggatcatcaattcgccgaggccctcggtattgcgcatcgcgcccccattgatcgtgacggccgagcagatcgatgaattcgtcgacgtgttgcccagtttgctggacgccgcggagaaccgatgaccgtgtcgcagcgcagcacgagctcagagcgcagccggtccaatcgcgtggcgcggcagggccgcatcctggagctgatccgttcccatgagatcggttcacaggcggaactggccgacatgctcgccgacgacgacatctccgtgagccagggaaccctgagcaaggacctgctcgatatcggggcggtccgggtccgttcggggtccggcctgctggtctacgcccctcccggcagcgagatcgcctccgaccacgcgttgcacgagcagcgcctcgcgcgcatctgcgccgaggtgctggtcagcgccgatgcgtcggcgaacctggcggtcctgaagaccccgcccggagcggcacagtactttgcctcggcaatcgatcgggtggcccttgattccgtggccgggaccatcgccggggacgatacggtgatggtcatttcccgcagcggcgacggcggggcacagatggccgagtatttcgtctcgatggcgcggaccggacgtcccgccgacggcgatggcaatgaagctgaacggagagactgagcaatgagcgatcatcaagagggcttcctgtggggcggacgtttccagggtgggcctgcggaggccatgttccagctgagcgtgtcgacgcagttcgactggcggctggcccccgaggacatcgccggctccattgcccacgcctccgcgttgcaccgtgctggcctgctgggggacgccgactatgagcagatggaggcagcgctgcgcggcatgctcgaggaggtccacagcggcgagctgcgacctgcaccgaccgatgaggatgtccacggcgcgctggagcgcatcctgaccgagcgcgtcggccccgtgttgggtggccgcttgcgggccggccgcagccgcaatgaccagatcgccacgctcatccgcatgtaccttcgccgggagatccgcgcactgggccaggacgtggtcgaggtgatcactgccctgtgtgcccagtccgacgcccatccccgcgcgatcatgcccgggcggacccacatgcagacggcgcagccggtcctgttggcccaccagttgttggcccatgcctggccgctgctacgtgacctggatcggttcaccgaccttgacaagcgactggccgtgagcccctacgggtcggccgccctggccggtagctcattggggcttgaccccgagctggtggcccacgagctcgggttcactgattcggtcctcaactcgatcgacggcacatcggcacgtgatctcgtctccgaggcggcctatgtgctggcccagatcggcgtggactgctcccgccttgcggaggatgtcatcgcctggaccacaccggagttcggcttcgcgaagcttgacgacgcctggagcaccgggtccagcatcatgccgcagaagaagaatcccgacgtcgccgagttggcacgtggcaaggcgggacggctgatcggcaacctgtgcggcttgctggccaccttcaagggattgccgacggcctacgatcgcgacctgcaggaggacaaggagccgttgttcgacggcatcgaccagctccacgtcctgctgcccgcgctggccgggatggtcggcacgctggcgttcgacgaagaacgcttggcggctgatgccccccgcgggttctcgttggcgaccgatatggccgattggctcgtgcgacagggggagccctttgcgaaggcccatgacgtcaccggtcgggcggtgaagttctgcgaagcccatggaatcggcctgcccgagttgagtgaccagcagctggccgccatcgatccggccctcactgccgacgtgcgcaaggtgctcaatatccagggttccgttgcctcccgcaatgcccgcggtggcacggcgccggtacgcgtcgccgaacagctcgccgccgtcaagcagcagagcgcccatttcgagaaatgggccgggtcggactactgagggagatgtcccggtccctgcagggcaattccccgtctgcagggactttcgtcggctccccggggtcgttgttcggggcgtgaagtgcacccgggcgctccacggtgaaggtcgatagagtggccgggtgaatgcgctactcgatgacctgacctggcgaggattcgtcgccaactcgaccgaccgggatgccctggccgcccatctggacgccggcatggtcacgagttatgtgggctttgaccctactgcccgcagcctccacatcggccacctgatgcagctcatccttgcccgacgcctccaacaggccggacatcgccccctactgctcatcgggggcagcacgggcctgatcggggacccgaagatgaccggcgaacgagtcatgaataccaaggagaccgtttccgcctgggtggcgagcctggccgaacagaccaagaagtacgtgagcttcgagggtgagaacggttcaaggatcgtcaacaacctggactggaccggtccgctgtcggccctggacttcctcagggacatcggcaagcacttcagtgtgaaccgcatgctggcccgcgacgtcgtggcacgacgccttgaggacggcatcagttacaccgagttcagctatgtgctgttgcagtcgttcgactacgcagaactccatcgcctctacggatgcacactgcaaaccggtgcccaggaccaatggggcaacatcaccgcaggggccgactacatccggcgcacgaccggcgacatcgtccatgggctcgtgacccccttgctgaccaaggccgatggcacgaagttcggcaagacggagggtggcaccgtgtggctggatcccgaactcacatcgccctatgccttccaccagttctggttgaacgccgaggacgccaaggtcatggactacctcaagatcttcagcttccgcagtcacgatgaactggccgagttggcggaacagaccgaacaggctccgtacaagcggcttgcccagcgggcgctggccgacgacgtgacggacctcgtgcacggggtcgaggcgcgcaaggcagcagatgaggcggcgcgggccttgttcggcaggggagagctggcggcgctggatgacgcgacgatctccgccgtcatgggggaggtcaaggcaaccgaggtctccacccgggacggcgagctgccgacggtcgtggatgcactggcggccagcggtgtggtcgcctcaaagtcggctgcgcgcaggacgatccaggaaggcggcgcctacgtcaacaatgcgaaggtgaccgaccctgatgcaaggttgagcgcggaccagttgctcgcgggtcgttatgcggtgctgcgacggggcaagaagacggtcggaggcgtgatcctgacgcggtgacacgccccaatgcccatgggccgtccacccggatctgacgccggggggaccgcccatttgcatgctcggtagcttccgtgtagagttcctttctgcctcctccaccgggaagcaccgcgaaaaagtccgaaggacacgatctgcggagccagcgggggtggaagccatccggaagagctgttctggttgagggtctcactgaggcactcggaaggaacagaaacaaggatgaggaccggacttgacggagacgccaagaaggtctaaagtagatagagccgcttcgggcggatcgcaacaagtcaagaagcatcaggaactcacgctagagttctgaatgtcaatgacagctcttggaaacaagggcatgatgtgaaaaatccgaagaggtcgagtcacctcgagttggtgcctgaaggaagtttttgggtgttggttcgtgtgtgtccgtttcttgagaactcaacagcgtgtctttttatagtcaatgattttattttgtttccgtgatcgttgatggtcctgctttggtgggattgttgatggttttggattcctttgtagtttgtattatttgattgagtccagtttttgggcttggtcaggttctactttttgttgacggtttttgctgtggtcctgtccttttggggtggggttgtggttgtgccgatattttttcaacggagagtttgatcctggctcaggacgaacgctggcggcgtgcttaacacatgcaagtcggacggtaaggcccctttcggggggtacacgagtggcgaacgggtgagtaacacgtgaggaacgtgcccttgacttcggtatagctccaggaaactggtggtaatcccgaatatgagcctggcctgcatgggttgggttggaaagctttatgcggtcagggatcgtctcgcggcctatcagcttgttggtggggtaatggcctaccaaggcagcgacgggtagccggcctgagagggtgaccggccacattgggactgagatacggcccagactcctacgggaggcagcagtggggaatattgcacaatgggcgtaagcctgatgcagcaacgccgcgtgcgggatgacggccttcgggttgtaaaccgctttcatccatgacgaagcgcaagtgacggtagtgggagaagaagcaccggctaactacgtgccagcagccgcggtgatacgtagggtgcgagcgttgtccggaattattgggcgtaaagagcttgtaggcggttgatcacgtcggaagtgaaattccagggcttaactctgggcttgctttcgatacgggttgacttgaggaatgtaggggagaatggaactctcggtggagcggtggaatgcgcagatatcgggaagaacaccagtggcgaaggcggttctctggacatttcctgacgctgagaagcgaaagcgtggggagcaaacaggcttagataccctggtagtccacgccgtaaacggtgggtactaggtgtgggtcccttccacggggtccgtgccgtagctaacgcattaagtaccccgcctggggagtacggccgcaaggctaaaactcaaaggaattgacggggccccgcacaagcggcggagcatgcggattaattcgatgcaacgcgaagaaccttacctgggtttgacatgtactggaagcgttcagagatgggcgtgcctttttggctggtacacaggtggtgcatggctgtcgtcagctcgtgtcgtgagatgttgggttaagtcccgcaacgagcgcaaccctcgtccaatgttgccagcagttcggctggggactcattggagaccgccggggccaactcggaggaaggtggggatgaggtcaagtcatcatgccccttatgtccagggcttcacgcatgctacaatggccggtacaaagagttgcgagcctgtgagggtgagcgaatctcagaaagccggtctcagttcggattggggtctgcaactcgaccccatgaagtcggagtcgctagtaatcgcagatcagcaacgctgcggtgaatacgttcccggggcttgtacacaccgcccgtcaagtcatgaaagtcggtaacacccgaagccggtggcccaaccttttggggggagccgtcgaaggtgggactggtgattaggactaagtcgtaacaaggtagccgtaccggaaggtgcggctggatcacctcctttctaaggagccttttcgccatcgtgcgtttcgtgggctgtgtcctgcggcgttggtggtggaggttgtggagcattgaccgtagattgtcggctggtttctgtttgttagtactgctggtgcccttttggggtgttggtgtggaacgcgggtgggggttggttggtggtcgtgggaggcacgttgttgggtcctgagggatcggccatgtttgtggctggtttttcggtgtggccaggtggttgttccccgtgtttggggggtggctggttgggtccgcccgtatgttgagaacttcacagtggacgcgagcatctttgtagttttttatgagttttgtgtgacaagctactaagtgcgatcggtggatgcctaggcaccaagagccgatgaaggacgttgtaacctgcgataagccctggggagctggtaaacgagctttgatccggggatgtccgaatggggaaacctcgaaggtgaccagtttagctactggcgaccgccgcctgaatgtatagggcggttggagggaacgtggggaagtgaaacatcttagtacccacaggaagagaaaacaaccgtgattccgtgagtagtggcgagcgaaagcggaagaggccaaaccgtatgtgtgtgatagccggcaggtgttgcatgtgcggggttgtgggaagcgttttgactgaactgccgtgaggtcggagagtgataaaggattgatgaagcagaagcgtctgggaaggcgcggcatagatggtgatacccctgtatgcgtaagttgatctctctcttaatgttttcccaagtagtacggaacccctgaaattccgtacgaatctggcgggaccacccgttaagcctaaatactccttggtgaccgatagcggacaagtaccgtgagggaaaggtgaaaagtaccccgggaggggagtgaaatagtacctgaaaccgatcgcatacaatccgtcggagcctgcccttgtggtgggtgacggcgtgccttttgaagaatgagcctgcgagttagtggtgtgtggcgaggttaacccgtgtggggaagccgtagcgaaagcgagtccgaatagggcgtttgagtcgcatgctctagacccgaagcggtgtgatctatccatggccagggtgaagcgacggtaagacgtcgtggaggcccgaacccaccagggttgcaaacctgggggatgagctgtggataggggtgaaaggccaatcaaacaccgtgatagctggttctccccgaaatgcatttaggtgcagcgtcatgtgtttcttgtcggaggtagagcactggatggtctagggggcttaccagcttaccgaaatcagccaaactccgaatgccgacaagtgagagcatggcagtgagacggcgggggataagcttcgtcgtcgagagggaaacagcccagatcatcagctaaggcccctaagtggtgactaagtggaaaaggacgtggagttgcggagacaaccaggaggttggcttggaagcagccatccttgaaagagtgcgtaatagctcactggtcaagtgattctgcaccgacaatttagcggggctcaagtcatccgccgaagctgtggcatctacgcgtgtatccggcatcctttggggtgtccaggtgcgtggatgggtaggggagcgttgtgtgtgcgttgaagcggcggggtgacccggtcgtggagtgcacgcaagtgagaatgcaggcatgagtagcgtatgacgggtgagaaacccgtccgccgaatatccaagggttccagggtcaagctaatctgccctgggtgagtcgggtcctaaggcgaggccgacaggcgtagtcgatggacaacgggttgatattcccgtaccggcgcgagaacgatcctgccgaggtgagtgatgctaagcatgcaaggcggtcgtgggggcttcggttccctgatcgttgagtctgtaacccgatcttgtagtaggcaagctgcggagggacgcaggaaggtagtctggcaccgtattggtttgcggtgttaagcctgtagggtgtctggccaggtaaatccggtcggacgtgtgcctgagaggtgatgagtggtgccacttttgtggtacgtatccggatgatcctatgctgcctagaaaatcttcgtgagcgagttctcgagctgcccgtaccccaaaccgacactggtggataggtagagaataccaaggcgatcgagataatcatggtgaaggaactcggcaaaatcctcccgtaacttcggaataagggagactggaggcgtgacggcagtttacttgtcggtgcgtcgatagtcgcagagaataggcccaagcgactgcttactaaaagcacaggtccgtgctaagtcgaaagacgatgtatacggactgactcctgcccggtgctggaaggttaaggggacgtgttagcacttttgtgcgaggcactgaacttaagccccagtaaacggcggtggtaactataaccatcctaaggtagcgaaattccttgtcgggtaagttccgacctgcacgaatggagtaacgacttgggcgctgtctccaccatgaactcggcgaaattgcattacgagtaaagatgctcgttacgcgcagcaggacggaaagaccccgggacctttactatagtttggtattggtgatcggtacgacttgtgtaggataggtgggagactttgaagcggtcacgctagtgattgtggagtcattgttgaaataccactctggtcgttctggttatctaacctaggtccgtgatccggatcagggacagtgcctgatgggtagtttgactggggcggtcgcctcccaaaaggtaacggaggcgcccaaaggttccctcagcctggttggtaatcaggtgttgagtgtaagtgcacaagggagcttgactgtgagacagacatgtcgagcagggacgaaagtcgggactagtgatcttctggtggattgtggaatcgccagaactcaacggataaaaggtaccccggggataacaggctgatctttcccgagcgctcacagcgacggaatggtttggcacctcgatgtcggctcgtcgcatcctggggctggagtcggtcccaagggttgggctgttcgcccattaaagcggcacgcgagctgggttaagaacgtcgtgagacagttcggtccctatccgctgcgcgcgtaggaatcttgagaagggctgtccttagtacgcaaggaccgggacggaccaacctctggtgtgccagttgttccaccaggagcatggctggttggctacgttggggagtgataaccgctgaaagcatctaagtgggaagcacgcttcaagatgagggttcctgcacagttaatgtggtaaggcccccggtagaccaccgggtgataggtcggatgtggaagcatggtgacatgtggagctgaccgatactaagtggccgagggcttgtcccacactttaattcttgtagattgttgtgaagagttttgttcgcgtccactgtgtcgttcccggtatacggtcgggaacctcctgttcatgccgccctgttggggttggtgtgggggggttgtacacgtagtaagccgatagttgtttcggtggccatagcgagagggaaacacccggtcccattccgaacccggaagttaagcctttctacgccgatggtactgcaggcgggagcctgtgggagactaggaagccgccggactttcaactccctcccacccgatggtgggagggagttactacattcaggacaagtttcactttttcatataggacggaccgaatggccaactcagataacgagtcgcgctcgcacgaccgggaggatccgggcgctggccagggtcgaggccgacgccgtccttatcgccccttggggggctcacgttccaatgattccggacgtccgcgcgatcgcggcggacgtcgttcttcggacaatgacgaccggggcagggaatcgcgtaacttcaatgatcgcgaacgtcgtggcaatcgtcgcgacgatgatcagcgtccacgtgaagatggccgttccggctggcggcgtgatgagcgcggccgggatgaccgggccccccgcggcgctggatcgtccggtcgtgggcgagatgactatcggggccgttccgagcgcggggatgctcctcgtgacgcggatcggtcgcgccgatggtcggatgatcgccgtagctcaggacggcgcgacgatgaccgccgcggcggttccacctggggtgaccggaaccggggtgagcgcgtcggttctgcacgcgatggcggacggggctcgtcgtcgcgctcggatggtcgccgtggtggcttccgcgaccgcgatgatcgcggagatgcacgtggacgtggttcgttcgggtcccgtcgcaatagtggtcccagcaactaccggcgcgaggatcgcgatcgggagggccagggtgagcgcgctggccaggggtcgtggcgtggcgatacacgtggttcggatcgtcgtgaccgcgattcgaggggatcgggccgaggccgctccttcggaggcagcgagcgtcgtggcgggcagggtggacgccctggtgagcgcaggggcggcggtggtttcgcggcccgtggtcgttcggagggccgccccgggcgcggtcgcgatgatcgggaagagcgttacgttgcacccgggctggagaagcctgccgacgagcccagcgtcgacacgtcactgattgacatccgatcgattcccggacccgttcgggccgagctgcgggcactgcccaaggacctggcgactgtcgtcatggcacatctgatggccgccggggagctgctggacgaggatcccgccctggcgcaggcgcatgcgatggcggcgcgacgcagggctgcccggctaccgatcgtgcgcgaggcggccgctgaggccgcctacgcgaatggcgactttgcgacggccctgactgagtatcgggctgtttcccggatgaccggcaatcccaactaccttcccgtgatcgctgatagtgagcgtgcgctgggtaagcacgatcaggcgctacgcaccattcgcgaggcacacaacgccgacctggacgtggtgcaggaggtcgagctggtactggtcgaggccggtctgcgcgacgacatggggcagcggcccgaggggctgcggctccttcgcaaggcgatcagcgatcgactcggacccaaggagtcccaggcccggctccggtacgcctatgccaacctgcttcagcaggagggcaatgagtcggatgccgtcaggtggttcgaagcatcgcaggccctcgacgtcgaagcggatcttgacgccgacgatcgtctgcgggaccttggcgtggacgttcccgagaaggaacccgacttcgatgaggaggactacctcctgatccaggaagaggaggccgaccccgaaccggaagtcaccgagtcgcaggatgattccgatgaaggtctgtcacccgatggcgatgaggactccgacggtgcagccgctgaagcaagtgcagcctctgaagcaagtggggtgcccgacttgggcccgaccagccccgaggacaccgatacgctgaccgttccctctgacgaggagccggatgcggagggcactgcgaacgcatcagatgaaccgacgccctctgcgggcgacgtcccggacagctcggaggatcacaagccggccagcgtggaggggaacctcgaacaacccgcactgcctcttggcgacaccccggagccggacgcaggtgtggcggaggaccagccacccgccggccccgatggcgagggagaggtccattcgtgacggcggttgttggtccccagcaagccctgtgcgatcagtacgacgccgcactgttcgaccttgatggcgtcatctacctgggcccgaatgcggtgcccggtgcgtcacaggccgtcgacgggctgcgtgcccatgcagtgcgcgtcggctttgtcaccaacaatgccgcgcgtcctccccaggtcgttgcagatcagctgaatcgcatcggcgtgcgatccacgatcgatgatgtggtgacaagtgcccaggccgccgcacgcatgctgcaggaaaccctcgaaccgggtgcccgcgtcctctgcctgggaacccgggcactggccgatgagatctcttcggtgggtttcacgctcgtggacagccgcctggatgagccggctgcggtgatccagggttatgacccggatatgacatggcctcgcgtcaccgatggcgtccatgcgattgcggccggagcccagtggtttgcctgcaacctcgacctgacccgtcccaccgacctcgggctggagcccggagttggcacgcaggtcaacgccgtgcgcgcatgtttccccgaccgggaacccctggttgccgggaagcccttccccgcgctgctgcgcgagaccgaacgacgtctgggctcgcagcatcccattttcgtgggagaccgccttgacaccgacatcctgggcgccttcaacacccagatggactccctgttcgtcttcaccggtgcccacggcgtccgggacctggtggaggcggttccccaggaacggccaacccacctcggctacgatgtgcgagcactcctggcccccgtgcggcgggcaaccgtcgacggactggtcgcacggtgcggcgagcagaaggtacgactcatcgatggggcactcgagctggaagagattcccccggggcgcgacgagcaattggacgtcctctgggcagccctgcagctcctgtggaagctgtccgatgatggtggcctgacccccgagtcgtgggcccccctgcagggcctggacaccctccactaggttcgggatcgctccactccacaccgtcgccggggctgttcggctgatcctcctctgagatcaattgaacagtgttcatgaaactcggtaggctcatcctgcgaagtccccacggggcgtcgtgcacatgcttcgcgggcgacgtcgccggcggatcggtggccaccgcatgaacagggggacatcccatgacagcaacacctgccaaagctggaaccgtcgtcgaagaggccggcaagggcttccaggccagtgatcttgccctgatcgcggtgttcgccgcgctgatggccgtcttcgccctcattccgccgatcttcaccgtgggcgccatccccttctccctggccatgatcatcgtgctgctcgcccccctggtgctgggatcgattcgcggtggggcgtcgatggcgctctacatcttggtcggcgtcgccgggctgccggtgtttgccgggggcgcgtcggggccggccaagctgatcggcccctcgggcggatacctggttggctacatcgcctgcgggctgatctgcggcgcgatcatgaccgcgctggtgcgtcgtcgcccgggccgccgggtactgccggtgctgctgtgcctgattgccgtcgtgggtgtcggcgtcgtgcacgtcttcggggtcgcatggttcatggtcgggccgctgcacctgacgctcggcaaggccatcgcgaccaccgctgtcttccttccctgggacatcctgaaggcggtcctggccggattgcttgccaccgccgtgttcctcgcctatcccaggctcatgccccgtccgcggaactcggcaaagtgatagagaacctgaagtgatcgatttccagggcgtcagcgttcaggtcgaggggtatgacctggagggccgtcccaccacgacaaccatcctgtcgaatgtcacggcccgactcgtggagcaccgggtggccgtcatcggtgcgaacgggtcgggaaagtccacgctgttgaagctggtcaatggactgatgaaggtgagcgcaggaacagtcctcgtcgatgggctggatccggcgcggcgccccaaggaggtacggcgccacgtcggacatgtcttcaccgaccccggcgcccaactgatcatggccaccccgctcgaggaggtggagctgagcctgcgtgcgtcggtgtcccatcgcggggaacgccgtgagcgcgccctgcagatcctggcggaccacgggctcagcaaggttgccaatcgcagcgtgcatgcgttgtcgggcggcgaacgccagctcgtatcgctggcctccgtcctcgcggtccagcccaccatcgtgatcgctgacgagcccaccaccctgctggacctgcgcaaccggatcctgctgtcccgggccttcgacgcactggagcagcagttggtcgtgtccacccacgaccttgacctcgcctccgccatggatcgggcgctgctcatcgacgacggagagctgattgacgacggacatcccgatgaggtcattgcgcgctaccgggcgatgatgtccgatcgggctgcggcgggtaacccacgatgagcgccgagacattccttggcgcctaccgggtgggccacagcctgatgcaccggtgcccactgtgggtcaagtatctgttgttggtggcggtcggggtcgtgccattcttcgcgaagaacgtgcccctgtccctcgccgccttcgcggtggcggccgtgctggtcgtggccggctcgggaatggggatctcgcagctgaacccgggcgtgggcctgctggtgatgaacgcggtcatcgtcgcctatgactggatcttccgcacctggcaggagggcgtggtcttcgcctgtggaatgatcgccaccttgtggttggcgcgcatcatcacctccaccacgcccagcgggttgatcatggacgggatcgcggcctgcgccaggccattccggatcatcggggcgaaccccgagaaattcgccctcgccgtgtcggtcatgtggagttcgattccctatctgctcgtctccgtgcgcaatgttcgcgatgcggcacgcgccaggggcctgcgcttctcgtggcggttcgtcgccccggtactcgtcaccgccgtggggcatgcgctccaggtgggggaggccctccaggcccgcggcctgggcgactagccaggcagcggcccccgaacagggagtctctccccgggataccgcagcgcacacccggtaggctttcgcattgtgagcacagaccgggacagcagcgtccaaccgacgcccacatcgccggacgacgcaccacttccgccggtcaccggcaacgaccaggtcgaccgcgcactggcggcgctcggccagctcccgacactggacgtcgagcagcgcatcgcccgcctcggtgccgcacaggagcagctccaggcgatcctcaacggctcgcgcgatgccggcatcccgatgccggatcctcctgcacgctgaacgatcgcacgcagagggggcaacctcgtccatcgtgcttcgtcggatcgctaggctggaagacgtgaatcaaagccgtcgcgtcgccatcaccatgcatccggtcaggaccgaggcccttgatggcgcggccgagttcatcgcggggatgaaccttcacgggatcgaatgcgtcgttgaggagagtcgcgtcgccgagatgcgccgtcgactgcccgatgtgcgcatcgccgcgttgtccaatgactcccaggtggagctgatggtggtcttcgggggagatggcacgattctgcggtccgccgagtgggccctgccgcaccgggtgcccctcctgggggtcaacctgggccacgtcggcttcctggcagagctcgaggcctcccagatcgatgagctcatcgcgcaggtggccgaccgcgactatgagatcgagaagcgactcaccctggccgtcaccgtgcgcgatggcgacggacgcaccgtgtgggagtccttcgccgtcaacgaggtctccaccgagaaggcctcgcgcgagaagatggtcgacctgttggtgaccatcgacgagcgcccactgtcgcggtggggctgtgacggcgtcctggtggcctcggcctccggctcgacggcatatgcgttctcctgcggggggccggtgatgtggcccaataccgaagcattcgaagtcgttccgatagccgcccacgccctgttctcggcggcctgcgtcgtggcacccacgtcgacggtcgacctgcggatggtgggggacatgtcgctgggggcggtggtgtggtgcgatggacgccgcagcgtcgatgtgcacgccgggtatgggatcggggtacgtcgcaatccggatgacctgcagatcgcccgcctgcgggagcagcccttcacaacccgcctggtgaagaaattcggcctcaacatcgatggctggcgcagccccgggctgcagcgcccgaccccggaaccatgctgaccgagctgcacatccagcagctgggcgtgatcaccgagtcgcgcctggagccggcacccgggctgacggcggtcaccggcgagaccggtgctggcaagaccatgatcgtcaccggactcggactgctgctgggccaccgcgccgacccgaccatggtgcgcacgggggctgagcaagcccgcgtcgagggggtgttcacaggtctcgacgacgtggccaccagactctccgagctgggcgccgagaccgatgccggcgaactgatcgtggcacgccaactacgtaccaatggtcgatcgcgggcctggctgggaggtgtcgccgcaccccttggcaccgtcgccggcgtggtgggggagttggccaccatccatggccagctggaacaggtccgattgggcaccgaggagcggcagcgccaggtgcttgaccgcttcggcggcaagcccgtggcggaggtgctggagcgctaccgcgaattgttcgagctgcggcgcagcgtcgacaaggagctcaacgagcgcgtggagaactcccgcgagcgggcccgggaggcggacctgctcgccttcggcctcagcgagatcgaacgcgttgacccacaacccggcgaggacacggaactggccacccgggcgcagcgtctgcaagccatggatgacctgcgcatgttggcgcaggaggccagccacgcgttgtccggtgccgacgacggcgaccccgatgaccccggggtggtcgggctggccggcattgcagtgaagaacaccggtcgcatcgccgagatggacccccaggcagaagcgctgggcgagcagctgaaccaactcggcctggccgcccaggaagcggccggggccctggcctcctatgtggcggggctggacgccgacccactcgcactcgagaccatcaccacccgccgcgcagagctggccgacctcacccgcaagtacggggagaacatcgacgccgtgctcgactgggcccgcgacgcctccgagcggatcgaggacctcggcagcgacgagcagcgcatcgaggcgctgcgcacccgtaggacgcagcttgacgagcagctgcaccaccaggccgaggtgctgcatggcctgcgcgtgaaggcagcccaacacctcgcctccggggtgcgcgaagaactgggcgcactggccatgccgcacgcccgacttgagttccgcctcgagccccttgagcttccggggccctggggctcggaccgggtgagcctgctcttctcggcaaatccgggcagcccgttggcgccgctggccaaggtcgcctccgggggtgagctgtcccgcatccggctcggcctggaggtcgtcctggccggatccgatccgggccacaccttcgtcttcgatgaggtcgatgccggcgtcggcggtcaggtcgccacggagatcggccgacggctcgccaagctcgcccggcattcccaggtgatcgtggtgacccatctggcccaggtggcagccttcgccgaacgccactatgtcgtgaccaaatccagcgatggcctggtgaccaccagcgacgttgaactggtgtcaggcgaccaacgactccatgagatcgcgcggttgatggccgggtccgagtcggacaaggcgctggcgcatgcccgggagctcgtggcggacgctgcgggcacccagaattagccacgagcgcagaacacgaccgatcgtgttgtcggacatcccctcgatgctggttttgcttgtgtcgtcctctatgctggaggtccgtgggcaacgcgaagcaaaccaagcatgtatttgtcaccggaggcgtcgcctcctctctcgggaagggcctgacggcttcaagcctcggtagcctgctcgtgtcgcgcggattgagcgtcacgatgcagaagctcgatccctatctcaatgtcgatcccggcacgatgaatcctttccagcatggtgaggtcttcgtgactgaggacggggccgagaccgatctggacatcggccactacgaacgattcctggaccgcaatctgacggcacgtgccaatgtgaccaccggacaggtgtactcatcggtcatcgccaaggagcgccgaggcgattacctcggtgagtgcgtccaggtgatcccgcacatcaccgatgagatcaagtcgcggatgttgaatgtcgcccagcccggcgatgacgtggtgatccacgaaatcggcggcaccgtgggcgatatcgagtcgcagcccttcctggaggcctgccgacagctgcggcgcgacatcggtcgtgagaacaccttctacatccatgtctcgttggtgccctacatagggccctcgcacgagttgaagaccaagcccacccagcattcggtggctgcacttcgcagtgtcggcatccagcccgacgctctggtctgccgttcggctatggaactgcccgagtcgatcaagcgcaagatcgccttctcctgcgacgtggacgaggagggcgtggtcgcctgccccgatgcgtcgagcatctatgccattccgaaggtgctgcaccatgagggactggacgcctatgtggtgcgggtcctgaaccttcccttccacgacgtggactggacgacctggaacgacctgctcgaccgtgtcgagcgtccgaccgaggaagtcaccgtggcgctggtgggcaagtacatcgacctgcccgacgcctacctgagcgtcgtcgaggcgatccgtgccggcggcttcgcgaactgggcccgggtacgggtgcgctgggtgaagtccgacgactgcgagaccgaggaaggtgccgccgaacaactcggcgacgtggatggtgtgatcatccccggtggcttcggcatccgtggggtggagggcaagctcggcgcgatcaaatacgcccgtgagcacaaggtgcccatcctgggcctctgcctgggactgcagtgcatggtgatcgaggtcgcccgcgacgtggccggcattgcggatgccgcctcgagcgagttcgaaccggacagcaagaacccggtcattgccaccatggcggagcagcgctccatcgtgtccggtgagggcgacatgggtggatcgatgcgactgggttcctacccggccgagctgaagcgcggcagcatcgtggcccatctctacggcaggaccaaggtttccgagcgccaccgtcaccgctacgaggtgaacaacggctaccgcgatcagctcgagaaggccggcatcgtgttctcggggctgtcccccgaccgcaacctggtcgaatacatcgagctgcccaccgaggaacatccgttcttcgtcggcacccaggcgcaccccgagttcacctcgcgtccgaccaaggccaatccgctgttcagtgggctggtgcaggctgcgatcgagcactacaagtcgacgcaccgcacggtacgcaccaccggacgcaagaagcccgccgcccgccgcacacgcacgagcaccaagcgcggctcgcgcaagagtgctcaggccggtgcggtgacggtcagtgagtgaactggtcgaccggtccgaacactggccgatcctgagccatcgggtcgaggcaacgggacgggtctgcgacttcgtcgaggacaaggtcgcaatgcccgacggcgacgtgatgacgcgccagtgggtgacccatcccggggccgtggccatcatggccctggacgaccaccagcgggtggccgtggtcgatcagtatcgccatcccgtggcgatgcggctcgtcgaaccgcccgccggcttgctcgacaagccgggagaacccccgttgtcggccgccaagcgtgaattggccgaagaggcgatgcttgcggccgatgactggcgcaccctggtggacatcttcacctcaccgggggggctcgaggaatccatccggatctacctcgccaggggcctgcacccggtgccccaccctgccggattcgtggtggaggacgaggaactcgacatggacctggcctggctcagcctggacgagctggtcaccaggatctatgcaggccagatcgagaatcccaacatgatgaccgggacgttggccctgcgcgtggccatcctggacggcagactcgatgcattgcgccccgcagatgctccgtggcccgcccgcgcggtgcgcgcggagcgtcgcaaggagatcgaggcgcttggctgacggtgcggcccgtccgccatcgcatggcaacaagccagtttccgggccgactgccggtcgactcggaaactggcttgaggactatctggaccacttgggagtcgagcgcgggctgtcacccaacacggtggctgcctatcgtcgcgacctgacccggtatctgcgccacctcagctcccgcgggatcgacgatccttcccggatcacgaccgctgatgtgaccagcttcgaggaggagctgtcccgcggggacgcgtcacacaaggccctggcgcccagcagcgtgggtcgagccgtggtggcagtgcgaatgttccacggctttgccgcgcgcgagggcctggttgaccacaatgtcgcggccgcactgcatccgccacgagccggcaagcgcctgcccaaagccctgggcgtcgacgaggtcgcccggctcatcgactccatcgagcggcagactccgatcggcctgcgcgatgccgccctgttcgaggtgctctacggcacgggcgcccgcatcagcgaggccctgagcctggacgtcgatgacctcacccgggtgctggcagaccccgatggccccctccgggtggtcggcaaggggaacaaggaacgcgtcgtgccgctgggcagctacgcgcgcagcgcagtgcaggcctggctggtggggggtcgacccgccctggccgaacgtgccagggaattcaccccggcactgttcctcaacacccgcggtgcccgactctcccgccagagcgcgtgggaggccctgcgaacgcgggcacgtcaggccgggatcaccgctgatatcggcccgcacagccttcgccactccttcgccacgcacctgctggacgggggtgcagacatccgcgtcgtgcaggaactgctcggccacgcgtcggtctcgacgacgcagatctacaccgaagtgaccgcccagcagctgcgcgaggtctattccagttcctttcccagggcccatgactgacccttgcgacaccggcgcggtcgccgcgccgatgtccggcatggtctgcggcgatgtcgtgttggcggcgtggcgcgcccctttactactgtgggcacagacgagacgaggagaaaccagatgacagcgcaagggtccaaggccgccgcagacgcccatggtgatgaggtccccgggcagctggacgccaccgggaggatctttcccgacctcgtcgtaccgcccctggcggagggcccgaagcgcgccacggtcattgccatgtgcaaccagaagggcggggtgggaaagaccaccacgacgatcaacctgggcgcggcgctgaccgagctcggccgctcggtactgctcgtcgacttcgacccgcagggctcggcctcactcggcctgggcgttcacccgcacacgctcgaccacagcgtctatgacctgctcatgagccgggagtacagcttcgacgacgtggtgatcaacaaccggatgccgggtctggacctgctgcctgccaacatcgacctgtccgctgcggaagtgcagctggtcagtgaggtcgcccgggaacagtccctgcgcagggtcatcgatccggtgcgcgaccgctatgacttcatcctgatcgactgcgccccctccctgggcctgctcaccatcaatgcgctgaccgcctccgatgaggtgctcatcccgatggaggccgagtacttcgcgctgcggggggtggccctgctcactgacacggtcagcatggtgacggagcgcatcaatcccaacctgcggctgctgggtgtccttgtcacgatgttcgacgcccgcaccctgcacagccggcaggtactggcgcgcctgctggaggtcttcggcgacgatgtcttccataccgtgattcgccgaacgatccgcttcccagagaccaccgttgccggcgagcccatcacgacctatgcgtcgaagtcacccggggccgcggcataccgcagcctcgcccgggaagtactggtgcgatgcgcgcgccagtagccggatccggtaccgggggccccacctcgagcggtcgggtgcgccacgacgagaagatcaccatctacctctccgccgacgagctcctcgcgctggaacaggcacgggtgaggctgcgtggcgaataccggatcagcgccgaccgcgggcgcatcgtgcgcgaggcgatagcgatggcgctggaagacctgggctcggccgagtccgggctggtgcgacgcctgggtgctcaggccggcaatgacatccaccaaccctgagcagggccgggaatcgtccagcttccgggtgcgcctggacaacttcgacgggcccttcgacctgttgttgcagctgatcaacaagcaccggctggacatcaccgaagtcgcattgtcgaaggtgaccgacgagttcattgcgcacgtgcgcgtcgggggtcgcgcctgggacctggaccagaccagcagcttcctggtggtggccgccaccctgctcgagctcaaggcggcgcgactgttgcccgggggcgaggtggacgacgccgaggacctcgccctgctggaggcccgcgacctgttgttcgcccgactgctgcagtaccgggcgttcaagcagatctcgaaggtcttcgccgccgcgatgcgccgtgaggaactcgtccacccccgccccggtgggctggaggaccgcttcctcgatgtccagcccgaactgaggattcccggtggtgcggaccgactcgcgaccctcgccgtgcgtgccctcaccccggccgaagccctggacatgccgctggagcagctgcacatcgtcaccgtcaacgtcgccgagcaggccgacctggtcgttgcccggctgcgcgcagcgggcacgctgagtttccgtgccctgacggccgacgccgatcgcatgacgatcgtggcacgcttcctggcgctgctggagctgttccgccatgctgccgtggccttcgaacagctgacgcccctgggggagctgacggtgcgttggaccgggcgccaggagggcgaggtgtccatcagcaacgaattcgacatctccggccccgtggactccacagagtcatcggtcgcgcccgatgtccgtgaggggcacgagccggcaccgatccgcgccggtgggaccggggacgacacgatggaggaattgtgaccaacacaccgccgaccgccccgaggtcagccccgcaggacgtcggacgagttcccgacagcacttccggggagatggccccggtaccgcccgccgaactcgcccccttcctggaggccctgctcctgatggccgaggagcccatcgacctggcgacgctcagcgaggcgagtggaacggccgaaccgcaggtgctggccgcactggaagaacttgccgccttctacgatgaaaccggccgcggcttccagctgcgtcacgtgggtgggggctggcggtactacacccgcgccgcccagcacgagcggatcgcggcgtgggtgagggcgggcggtcagaaccggttgagccaggccgcgatggagacgctcgccgtgatcgcctacctccagccggtggcacggtcgcgcgtctccgcggtgcgtggggtgaacgtggatggcgtcgtgcgcaccctgctgtcacggggcctggtggatgagcggggcagcgatgcccagacgggggccggcttgttggtgaccaccgactacttcctatcccggctaggcttgagtgccttgtccgatttgcccgatattgcgccgctcctgcctgatgcggctgctcttgaggcggaattgacgtcactggcggccccagcagggtccgatgcgtcgtcgcaggcaaccaatgaggctgcaccgcgggaccgtcccgatgacggtggacgcgacgaggtacctcaggaggggtcacacaccaatggctgagaaggatatgagcgagacacacgaaccaccgattgatcagtccgcggcaaagccggaggggatccgcctccagaaggtgctggcccaggccggcatcgcatcgcgccgggcgagcgaggggctcatcaccgaagggcgcgtggaggtgaatggccacatcgtcgtggagctgggtacccgcgtggatcccgaacatgactccattcgcgtcgacggtgcccggatcccgccgccgcgccgtcacatgtacctgctgctcaacaagccgcggggcgtcgtgtccaccatggacgacccggagggccggcccacgctggccgaatatgtgccccgccaccagcgtctgttccatgtgggacgccttgacaccgagacggagggactgatcatcctgaccaatgacggtgaattcggccatcggttgtcccaccccagttacgaggtgcgcaagacctacctggttgacgcggagggcctgatggacaatcggacgatccgtcgccttgagaagggcctcaccctggaggacgggcccatcaagcccgaccgggtgaagctggtctcgcgcggaccggtgcacacgatgctgcagatcaccctccactcggggcgcaatcgcattgtgcgccgcatgatggattcggtcggccatcccgtacgccaactggcccgcatcggcatcggcccggtgcgtctggggaaccttgccgtgggggagacccgggaactgagccgtgaggagctcgggaccctgctggacatcgtcaagctctgaccgcccgacccattcgtccgcgcaggcccgtgagcgcgtgtgtcagctagcatggccgcgtgatcatgccctcttcgcgacgtcgccccctcacgccgaccccttccggggtgcgtgcctcctggacccgtctggtcggcctggcagcgcttcccctggtgctggtggccgcgggctgcgccgcttcgcccgggagtgggacctcgccgtcagccggtaccccgtcggcgacttcggcgtcagctgccaccacgacggcaggttcgggcacctcgtcggccggtggctccgccgccgtgctgacctcactcgaccaggtgcaggtcaccggtggcgtcggacaggcacccacggtgacggcccagtggcccgtgtcggtcgaccagaccctcagcaaggtgctcgtggccggtagcggccaggtggtgggcgccgatgcaacggtgcaggtgaactacagcggcacgaatgggcgcaccgggcaggtgtttgattccagcttcaagaacggaaagcccgcaacattcggcctcgcccaggtgatcccgggattcgagaagggcctgaccggcaagcacgtcggcgaccgcgtcctcatcgcggtgaccggcaaggacggctatgactccgcagggggcgccgccgcggcgggcatccaggtcggggactccctgttcttcgttgtcgacatcgtggccgtctcctgaggagatggcgcacccggcccgtcggccttcccggccccgggcaatatctgcacgctgtgaggtcggctagcatgaatacgtgtccatgaccgatcattcagaccacgccgccagtgcctcagcgtcccgacatcgctggacacgctgggccagcctcgcgctggtgccgatcctgttgttggctgccggttgctccaagagcgacgccagcgccagcccctcatcagcctccgccccggcatcgcaatccgccacgtcgacggcttcggcctcgtcgagcggcaagctgctgagctcgctggattcggttcaggtgagtggtggctatggccaggaggccaccgtgaccgccgattggccggtgcaggtcaacgagaccatgagcaaggtgctcgtccagggcaatggccaggccgtcggctccacgtcctatgtggaggtcaactacgtgggcgtggatgcccgcacgggccagaccttcgacaacagctacaccaagggtgcgacggcgacgttcggcctgtcacaggtggtgccgggcttccagaagggcctggacggcaagcacatcggtgaccgcgtgctgatcggcgtcaccggcaaggacggctacgacgccatgggcggggcatcggctgccggcattgaggtgggcgacaccctgttcttcgtcgtcgacctggtctccacgcagctgaaccaacccagtggtgaggcggtcacccctgcggccggactgcccaccgtgtcaggcgacatcaacaatccgtccatcacgattccctccggcgttgccgcgccctcggacctggtggtccagcccctcatcaagggcaccggcaagcaggtggcggccaccgataccgtcacggtgaacttcatctccatgtcgtggggtgattcccgggtggtccagtccacctacagcaatgggagcaactctccccagaccggggccctgagcggcctggtcgagggctggcagaagggcctcgtcggacagccggtcggcagccgcgtcctgctcgtcgtacccccctcgcaggcctacccggatggcaataccaatccgagcatcgcccccaatacgacgatggtctatgtggtcgacatcctgttcacccgcgccaccacggcatcctgatcgaacctgcatggcagaacctccgggcaattcccggaggttctgccatgtctggcgtcatggagcctgacgtcggcctgcggggcagtccgtcctcgcgttgcgggcgaattgcgttgcccgtgagttgtgttgcgggcgatcagtgccgcagcaggtggtcctgggcatccagtacacacggctgtgccagggcgggtcggtgcagcaatcccggatcagcgcgcaccatggccagcaactccccggggcactcggcggtgggcagcccgcaggaatcggtgagcatgcgcagcacacggcgggcatcaatgccctgggctgccagcgtcgtcatgtcagtcggatggtcacgcttggcaagccgaacgccggccccgttcagcaccaggccgacatgtgcgtagaccggctggacgtagccgaggcggtgggtcaaccacgcctgccgtggcgcggaggacagcagatcagctccgcgggtgacctgccgaacgccctggagcgcgtcatcgaccaccgacgccaggttgtaggacggcgtgccatcggcacgcagcagcacgaagtcatcgacccgttgggagtagtcaccggcaaagcggtcgtggacggtccactcgatcccgcccgcccgcacccgcagggccggcgtccgtcgggtcctggcctcggcccgctgggcggcgctcaggtgggcacaggtccccgggtaggggcgatagtccccatgcggcgccgcagatgcctcggcgatctcgcggcgtgagcagaagcactcgtagctggacaggcgatccgcgtagctgcgatagagctcgatgcgcccactttggcgcaacaccggtccgtcccagtcgaggcccagtgccgcaaggtcccgcagttgctggtcagccaccccgggagccgcggccacacgggcctgatcgaggtcctcgatgcgcacgaggaagcgcagcccctcggccctggcgaacaaccatgccaacaatgcggtgcggagatttcccaggtggagctgcgaggtgggggagggggcaaagcgacctgcgcccgaccggtcacccgcaccggtcgggacaggggcatcggcgttcatgcaccccatggttccacgcgtcttccggtgcccgcccgcagacccgggcgcgctggtagcgtttgggcgtggcagcgcgtagatccgaacgactcgtcaacctggcgatcgccctgctgtccgcacgccgtttcctgtcgaaggccgaactgcgcagggtcgtggaggcctatcgtggcttgagcgactcggccttcgaacggcagttcgagcgggacaaggacgacttgcgggccatgggcgtgccggtggtgatgggcagcaacgacgtcctgttcgacgacgacaccgggtaccggatcagtcgcaccgactttgagttgccccccgtttcctttgactacgatgaactctccgcgctgggggcggcctctcgtgtctggcagcaggccagcgctgcagagcagaccatctcggccctcgcgaagctgcgggctgccggcgccgatccggatgtcgagcggctggctgcgctggcgccgcggatcagtgccagggaacctgccttcgaggtgtgctggcgggccacgctcgagcgtcagttggtgcggttcggctatcgcgggtcgccagaagtgcgcacggtggcgccgtggagcgtgctgtggcgtcgtggcagctggtacctgttgggcctggacctcacgcgggagggtccccgcatgttcaagatgagccgcatgaacgccacccccgagacggtcggcgggaccgatgcctaccaggtacccgatgacgtcgacctgcaggccctggccaggcaggtggagcccggggagccggattcgcgcgccctgttggcgctacgggacaacaaggcgcccgccctacgccggatcggtacgccggtcgccccaccgcgcgccctgcccgagggcttcgcatgcttcgaggtgccctacacccgcgattccgacttcgttgccgacatcgctgcggccggtcctgacgtggtggttctggagcctgccgaactgcgcgatcaggtattggcgcagctgcgcgcagtgctggaggtcagtcatgacaggtcttgatcaggtccgccggatgctggccgaggttccctatctgcaagcacatcccggcgtgagtgtcaccgaagtggccagggcattcggtatcaagaagcgtcaggtgctggccgacctcgacgtgttgtggatgtgtgggcttcccgggggcctgccgggggatctcatcgaaatcgacatggaagccgtccagggcgagggcatcattcggctgaccaatgccgaggtgttgagcaggcccatgaggttcaccgccgacgaggccacgagcctgatcgtggcgctgcgtgccgtcgagggactcaccagcggcgccacggcatcggcggcgcgccgtgccgcggagaaactcaccgcgatcgttccctcctcacaagcaggtcgcgtgggtatctcgctcgcctcgggcgcccccgacatgcgtgaacagatcgccacggccgtcgaggggcgcagccagctccgcctggaatatgacaatgcctcgcgcaatgagaccacccatccggtggtcgatcccgtggcgatccaggtgcgggacggcgtggcctatttgtgtggctggagcctggaacgggatgcctggcgttccttccggttggatcgcatagtgacggccaggcccaccggccagaaatcttccgcccacgggacacccccaccggtcgacgactggttcacccagggatctggccaggtcacacttgacctggccccgaaggcccgctgggtggtcgagtactacccgacggattcggtcacggagctgccgggcggagcccttcgggcgacgttcccggtgggggacccctcctgggtttcgaccatggtgctgcggctgggcgagggcgtgctgcacgtcgacccgccgcaagccgctcgtggtgctgccgagcgtgccgcgtccgcgctcgaactcaatgaacagctcgggcaggtggacgcgtaagctgatcggcgggctcggccggtgtcgggccactgcaacccctcaccccacgattctcgtgatcaagccggacggatccggcgtcgacgaaggagtttgagatggatcttggatggcaggagcttctcattgtcttgctgattgccctcctggtgttcggcggcagcaagctcgccggcctcgggaaggcctcgggcaaggcaatccgtgagttcaaggaagagacccagggactcaacgcgaagaagaacgcgcagggtcaggccgacgcgcaggcctcacagccggctgttccgccgacggtggtgacccccaacacggcccagccgcagtccgggcagagcgcccagggccaacccggtggacaggttgtcaacggcgaggtcgtcgacccgccccagaacagctgagccccttgagccggtcacatggccatcaccgtggatgaaaaggcgggcgacggcagccaggaagcggctcccggcaagaaacggcgtcgcctccacctgctgcccaagtcgtggcgccctcccgagcccgccgccgacgggtcaatggagctcgtggaccacctgcgggagctgcgctaccgcgtcatcgtgtcgatcctcgcggtcctcgccgtggcgctgtgctgcttcatcttctacaaccagctgacggccgtggccttccacccgatccagcaggcgatcgaggtctaccgggccaagaacccgggcgctgaggtcgagatcaccacgacaaatgtcaccggtggcttcaccctgttcatgaaggtgcccttcatcgccggattcatcctgtcgtgccctgtctggctgtaccagctgtgggccttcatcgcccccggcctgctctcgaatgaacggcgcgcggcgatccgcttcctgggcacctcgattcccctgttcctcaccggcgtcctgctcggctattggatttcccccaagggctttgccgtgctcctgcagttcaacccgcccggggtgctgaacctcaacgacgccaacgagttcctcaccttcgagctgaccctgctgctcgtcttcggggtgagcttcctgttgcccgtcgtgctggtgaccctcaaccggttcggcatcatctccggtgcggggctgggcaagttccggtccatggccatcttcctgtgcttcctcttctcggccgtcgcgacgccctccaccgatccgatctccatgtgcgtgctcgccgtgcccatgtccttcctgtatgtcattgccgaagtgctgtgcaagcgtcatgataagaggcaggtggctgaacaacagcaatgacgctgaggagcaccaatgacttccgtattcggcgaagccaggtccgatgaggggctccacggccccgccgaccctgcccgggtcacactgctcgtgagcccctcggccggccacggcatggcccacatcatggcgcccggcattgcactgcaacttcgtcgcaggttgccccacacatgggtcgacgtcgaggtttccaccagtgcgcaccaggcacgccagttcgcggccggggttgtcgcgcatgccgcccgggccagcgccgggcagcgccccgatgtgctggcgaccctgggcggcgatggcaccgcctccaccggcatcaacgcctgtgccggctccggcatcccgttggccgtgttccccgccggtaccggtgacgatttccggcgcggcgtcggttcccccgcccggccggcgcgggtgattgatgcgatcgtggacggcttcacgaaacggatcgacctcatgcgcgccacgtcgtcggccgatccggaccggccgccctactgggtgggctcggtggtgtccaccggctacgacgccagggtcaatcgtcgggtcaaccgctcggtggtcaacctgggcaagctgagttacgccgcggcggtgttccaggaggcgatgcacttcaagccgctccattacgtgttgggcatcgaccacggtgtccgacgggacgtggaggccctgttggtcgcggtcggcaattgcggctacttcgggggtgggatcaatgtgtgtccggccgccgaccccaccgatggggagttggacgtgaccatcgtgcatccggtgggcgtgggcaccctcatgcgcgaattcccgaacctgtacaacggcaccttcgtgcgcctcgaacaggtggagaccctgcgttgcacctccatccacgttgatggtgacgggttgttcgcgctggccgatggcgaggagatcggcgatgtgccgattgacctggacgtggtgcccgccagcctcgacgtcttcgtcaaccggcccctgccgcacatgaccacgcccgagtagcgggggagaccctctggcggcgccatggcgcccggacgtcctagtccaggccgaaccagtccatcaggaagaccgcgaccccatcgtcggcattggtggcggtgccgtggtccgccacctgtcggacggccgggcgggcattgcccatggcgactcccacggcggcctcgtggagcatctcgacgtcattctcggcgtccccgaaagccatgactcgacctgcctccaggcccagcatcgctgcggcccggcgcatgccgacggccttgttgatcccgggatactggaactcgaacaaggtgtcggcggtcctgacccccgtggcgcgcgtcgcatcggtgagctgcgcccggcgttcgacacgggccatgtcccctgcgtggcacatgacatgcagcttggtgcgcggctggtcgagcgtggcgacgagcccgggatccacggcggtccgtacgcgtccggactcggccagcgcatcgagcaatccatcgtcatgcgccgccacataggttccgtcgacgaccaccgcgaagttcaccggcaggtcggcgtagaccgccatgatgtcgcggaagacctcggggcgcaccaggtagtcacgctccacctggccggtgcgcaggtctgccacgtcggcgccattcatgcccaccgcgacatcgacgagcccggtcaggccccacaggtcgaacagagcctccagagaccgcaggtcacgtccgctggccgtgccgaagtggactccgcggcggcgcagggcatcaattgccgaaagggtgcgtgacgagaccatcgattcgggatcgagcagggtgccgtcaaggtcgcacagcaccagcgagatcccggggcgcgcgcacagacgccccgtcggggtgggggcaaggggggaggtcacgccgccagtctgccatggcagggcgtagtgggagaggggaaccggcggtccccgatggtgacggtccgcggtgtcccatcgtgggctggacggctgttcggggcgcatgcggagggcctcactaggctggaggtgtgaatactgccgatgcggagtcgaccgccaaagcgacaccgagcgagaatctgcgtgacttcgccggccactacgacttttcctttgactccttccaggtgcaggcgtgcgggagcatcgatgcgggccacggcgtcctggtggccgccccgaccggttcgggcaagaccgtgatcggggaatatgcatgcttcctggcggtgcgcgagcacagccggtgcttctacaccacgcccatcaaggcgctgagcaaccagaagtaccacgacctcgtggcggcccacggcgccgacaatgtggggctgctgaccggcgatgtcacgatcaatggtgacgcacccatcgtggtgatgaccaccgaggtactgcgcaacatgctgtacgcagtgtctcccgatctggagacgctgagctatgtggtgctcgacgaggtgcactatctgtcggaccgcttccggggcgccgtctgggaggaagtgatcctcggcctggccgaatcggtgcaggtcgtggcgctgtcggccaccgtcagcaatgccgaggagttcggcgactggctcgacaccgtccgcgggaatgtcgacatcgtggtctgggagaagcggccggtgccgctctaccagcacgtgatggccgaccatgagatctacgacctgttcggcagcgacgggcgctcggtgaatcccaagctcacggcgctggcgcgccaggaatcgcgcaccacacgcgatgactcgcgccgccccagggggcgcaatggccgtggcaagcgacgcgtcacctacgggtccggccagttcggcggagcctcgagttcacgggtgggagaccgccgccaccagtcccacgggctgaccccgagtcgggccatggtggtgaccgcactgcagaaggcgggcctggtccccgccatctacttcgtcttctcccgccagggctgcgatgccgcggtgcgccagttgttgcgttccggggtgcgcctgaccgaccgcaccgagcgcgcacagctccgcgaactcgcccagcgtgagggcgccagcctgtcggagacggatcgggccgccctgggctggaatgacttcgtcgaggcgctgtcacggggcatcgcggcccatcatgccggcctgctgcccgtgttcaaggcgatcgtcgaagagggattcacccgcggctggctcaaggtggtcttcgccacggagacgctcgcgctcggtatcaacatgccggcccgcaccgtggtgctggaacggttggtgaagtacaacggggagacccatgccgacatcacgccgggcgaatacacccagctgaccgggcgcgcagggcggcgcggcatcgacaccgagggacatgcggtggtgctgtggcaaaccggcatggaccccagggcggtcgcggggctggcctccaagcgcacctatccgttgcgttcgagcttcgcacccaactacaacatggccgtcaacctggtgcgcagtgccggccgtgatcgggctcgatcactgctggagcagagctttgcccagttccaggcggaccgcaaggtggtggcggccgcgcggcaaggggtggccgtggccggtcagatcgccgacgcctggcagcaggcacactgttcccggggagatttcgccagctacgcacggctgcgcgatgaggtgcgcgagctggaacgcgagcaggcgcgcctgcgcaagcaggaccagcgcgctgcagtgctggatggcctgagtcggctggaacccggggatgtgatccacctggacgccggcaagcgctccggctggctcgtggtcatcgagcccgcccggcccgggaagcccgaaccgcatccgttggtgatgggtgaggaccaccagatcgtgcgcatcgctcccgaacaattcaagtcggccccggtgacggccgccaaggtgcgggtccccaagcgtttcgaccggcactccgcggcggcgcgcaaggcgctctcgcgagcactggacgcccgcatcgaggggctgtccgtcgaggccggccgctcccgggcgccccttgatgccgagctcagccaccagatctccgaattgcgcgcccggctgcgggcgcatccctgccatgactgcccccaccgcgaggaccatgcccgcgccgcggagcgggcgctgcgcctggaacgcgagaacaacgtcacccagcgccgtgcagcagatcgacgcaattccattgcggcccagttcgaccggatctgtgccgtgctggacgccctgggctatctcgacccaagtcaccccgacgaggtgaccccggcggggacaatgctcacgcgcatctacagtgagctcgacctcgtggtcgcccaggcgatcagggagaaggtctttgccgagctcaacggaccgcagctggcggccgtcctgtccaccatggtctacgaggcccgcgccaccgacaccggtggacaccgcatgcccgacgacaccagcgcccgtgccgaacgagccctccgctcggtgtggcgcgaggtcggactggtcgagcgcgaccatcgcgtggaacgtcagcgcgatcttgatatcggctttgccgacacggcggcacaatgggcctcaggggcctcattggccgacatcctgggtgagttcgggctgacggcgggcgacttcgtccggtggaccaggcaggtggtcgatctggcgagccagatcagtgcggcccccggattggcggagctcggttcaccgggcctcgccaggacctgccgggcggtcatcggcctgctgcgccgcgacatcgtcgacttcgagaccgccgagcccgaataggtccatctcccgtggtggtgatgcgtgcccatgcgcggggagcgcgccatgatggagtcatgatcgcaattaccgtgaaatgggacgtcaagcccgagtacgccgacaagttcatggacctggtcgatgagttcacccgggcatgtcgcgccgagccgggctgcctgtggttcgagtggtcacgttcggttgacgaccccaaccagtacatcctgctcgaggcctacaaggatggtgcagccggcaaggtgcacgtggagtccgaccacttcaagaaggccatggcgacgcagggccagtacgcggccacccgtcccagcgtcatcagccttgagaccgatcaggatggctgggcaccgctggcagagatcaacatgccggggcagtaggcgttcaccgggcattcaccggcccgtggctcctcgcggcgggtgggcgtggggccgatccgggcgaccaggtggtccccggatgagcggccccacgggccaatccgtggtgggtcagttggacccggggcgagtgcgtgggttcgtcgtgacggtcagctcggggtcgcgctggaccgagtcgcccagcacctcatcgatgcgcgacatgagctctggcggaatcttcacgccgctcgccccgacattgctcgtcacctgctcgggacgcgatgcgcccaccagcgcagccgcgacattgtcgttctgcagcacccaggcgatggccagctgggccatcgtgatgccgagttcatcggcgatcggacgcagcccctgaacgcgctcgaccgtcttctggtcgtgctcgatgaggttgtccaacccggcaccgaccttggatgccgcgcgactgttggagggaaccggcttgccgggcaggtacttgcccgtgagcaggccctgctccatcggcgaccagacgatctgggacaggcccagggtgcgggacaccggcacgacgcgcggctcaatcactcgccacaacatgttgtagtgcggctggttgctcaccagggggatgtgcagctcgcgggccaggcgcgaaccggcctcaatctgctcagcggtccactcactcactccgatgtagagcgccttgccggcccgcaccacgtcggcgaaggccaacatcgtctcctcgagcggggtctcatagtcaaagcggtgcgcctggtacaggtccacgtagtcggtgcgaaggcgccccagtgaggcatcgatcgactccatgatgtgcttgcgcgacaggccgacgtcgttgggtcccttgggtccggtgggccagtagaccttggtgaagatctccagggactgacgcctggtccccgccagggcctcacccaggacggtctcggccttgccattggcatagacgtcggcggtatcgaaagtggtgattccggcgtcgagcgcggcatgcacgcagtcgatggccaccttgtcgtcgatctggtcgccgtgggtgagccagttgccgtaggtgatctcgctgatcttcagcccggagtttcccagataacgaaattccatgttgtcgcccttcctcagacttcgccaccaccagccggtgggactgtcaggaaccattcaagcgcggcaagctagggtttagccatgagcgtcgcgatccgagtcatcccctgcctcgacgtcaaggacggccgggtggtcaagggcgtgaacttcacccacctgcgcgatgccggcgacccggttgagctggctgcggcatatggggtgcagggcgccgacgaactcactttcctcgacatctcggccagcactgagggacgcgagaccacccgcgacatggtgacccgctgcgcggagaccgtcttcatcccactgacggtcggtgggggagtgcgccagcctgacgacgtcgacgcgctcctgcgctgcggcgccgacaaggtcgggatcaataccggcgcgatcgccagacctgaatcgatcaacgagatcaccacgcgcttcggcaaccaggtgctcgtcctcagccttgatgcccgccgcgaggccggtatgccgtccggctacggcgtcaccacgcacgggggcacccgatcggcgggaatggatgccctggagtgggtgcgcgaggccgtcgaacggggctgcggtgaggtcctcctgaattccatggacgccgacggcaccgaggacggattcgacctccaaatgaccgaagcggtgcgcaatgtgattgacgttccgctgatcgcctcgggtggggcgggtcgggccgaacacttcgtggaagcggtacgtgccggcgccgatgccgtgctcgccgccagcgtcttccactatgggcagctcacggtcaaccaggtgaagcaggcactggaccaggccggtttcccggttcggctctgatcccgacgtggcgccctctggccggtcatcggctgcgcccgccggcacgccgggggccaggaggtggctgcgcggcctgcgggccgtcgtctggtggggcgcggtggccggcccggcccttgccgtctcgctgctcctgacgggtctccacgccggccccacccgggggacgtgggccccggtgatgccgtacgcgcgggccatctggttcggcgagcaccgcctggtggcactcgattcggtctaccggatcaccgaggccggcgcaccggggaccttccccctgtccgtgaccggattggtgctcggtgccccgatcacggtgggcagctggttcttctggcagctggcgttcctcgcagcgggcgcggtggccctgtgctggatcgtccggcgttgttggccgcgggccgggggtccggccgtcgcagccggcgcggcagccctggcgctcgggtgtgccccggtgcgatccggcatgcagctgggcacgatcgacctggtcctgctggcgctgatggtggctggactgtggccgcgccgcccgtccaccccggtccccggtctggcgttggggttggcagcggccgtcggcatcggtccgatcacggcggcgctcgcggccgtcgcgggaggatcccggacaccatcggcacccatgcggcgccgggggatgatcgcgatggccgtggttgtgttgctcagtggctgtgccttcctggtcgccccatggaacgggaccgacttctgggtgatgctgttcggtggccgattgggtggctggccggtgatcgatcccagtctgggagcccgcgcaggtggggccggctgggtgatcggggctgccctgctcctgctggcgttgggcgtggctgcgtgggcctggcgacacgagaggttttcgctgggagtggttgcggtctgcctcgccctgagtatcgggatgccgggccattgggccctggcgggactaccggccctgctggcggggctcgtcgccctgtcgtccccccgcctgccgtggcgcgtcgcgaccctcgcatgggcggcctggacatgcctgctgcccattgacctggtgcaggacaagcttgcgtggatcaccccgatgtggggttggggcagcgccgtaggggcgggcatcctggtgctcctcatgacgatcgaatgcggcgggatgcttcgaatggcgagaccacgcgtctcatgatgtgagactatgggccctcttgtcagaacgggccgcgaggtactgccatagttcattacgtgctcgcaggacgaattcttgtactcgcctagcgcttcgttgaagtaggacggagcgctccctcgtatgccgtaaggcagcgagggtttttctttggcagcgacgttggtcgcaccaacgaagcggggaagtggaagatcctgtgaaccggccatggcggaaccagcgcactcgctggttccgggcaaggggagccggatcggaagatgcttccgatcccatacgaaggaggatgcccatggcggaccaggagcgaacctcgcaacagggttcaggcatgatgactggtgcccagattctgctcgagtcgctgcagaaggtgggtgttgacacggtattcgggcttcccggaggagccgtgctgccgctctatgatccgctcttcgattccccgattcgccatgtcctggtacgtcacgagcaggccggcggccatgccgccgagggctacgcgctggccaccggaaaggtgggcgtgtgcatcgccacctcgggaccgggcgcaaccaacctggtgacccccatcggggatgcctacctcgactccgtgccgatggtggccatcaccggccaggtcaactctgccttcatcggcactgatgccttccaggaagctgacatccgcggcatcacgacgccgatcaccaagcacaacttcctcatcaccaatgcggccgacattcccgcggcgatcaagaccgccttccacatcgcgtccaccggacggccgggtccggtcctggtggacgtctcgaaggacgccatgacggcattggcgaagttcgtgtggcccgacaagatcgtgctgcccggatacaagcccacgaccaacccccatgcccgccagctggcccaggccgccaaggtgattgcgaaggccgaacgccccctgttgttggtcggcggtggggtggtgcgcgcccgggccgcccacgagttggccgagttcgtgaaggtcacggggatcccggtgaccaccacccttccggcgcggggagtcttcccggaggacagcgacctcaacctgggcatgcccggcatgcatggcacagtcgccgccgtgggagccatccaacgtgccgatgtgctcatcgcgatcggtacgcggttcgatgatcgggtcaccggtctggtctcgagcttcgccccccatgccaccgtgatccatgccgacatcgatccggcggagatcgggaagaacgttccggcggccgtgccgatcgtgggcgacgcacgcaaggtgctcgcggagctcacctcgcacctgaaggagaccaagcaggtcgatcgctcaacctggaccgactatgtgaccgggctggaacaccgctacccggtgggttgggaggagccgaccacgggcaagctcagtccccagcacgtgatcaagcggatcggcgagcacttcggggatgacaccatcttcgtgaccggcgtcggccaacaccagatgtgggcggcacatttcctgccgttcgagaagcccggcaagtggctgtcgtccggaggcgccgggacgatgggctactgcgtccccgcagccatgggggccaaggtcggtcgtcccgacaaggtcgtggtcggtatcgacggcgatgggagcttccagatgaccaaccaggagctcaccacctgtgcggtgaaccacatcccgatcaagatcgcaatcatcaacaacaacacccttggcatggtgcgccagtggcagtccctgttctacgagcaccgctactcgaacaccgacctccactccgatcaattgccgaactttcccatgctggccgaggccatgggcgccgtgggcctgcgtgccacgactcccgacgaggtcaccgaggtgctcaagaaggcctccgaggtcaacgatcgcccggtggtgatggagttcgtgtgtgagaaggacgcgatggtgtggccgatggtcgcctccggcgtcagcaacgacgagatcaagatcgcccgggacatggctcccgaatgggacgaggaggagctgtgagcagacacacactgagcgtgctggtgagcaaccattccggggtgctggccagggtggccggcctgatttcgcgtcgtggattcaatatcgagtcactcgccgtgggaaccaccgagcatcccgacgtgtccaggatgaccatcgtcatggacatggccgatgagcgggtggccgagcaggtggtcaagcagctcaacaagctcatcgaggtctacaagatcgtggaactcggcgatgatgccgtcaaccacgagatgttgatggtgaaggtgcgctgcaccgatcacaaccgccctgccatcatcgatctcgccaatttgttccgtgcccacgtcgttgatgtgagtccggagtcggtgaccgtggaggtcaccggggggcagtcgaagatcactgccctcaccacgatgctcaccccctacgggatcatcgagctggtgcaatccggccaggtggccttggaccgtggttccaagagcatcaatgagaagaagcgtccggcgctggccaagcattcatcctgagtgcaagcagtcccggtcaaaacaaacaaaatcaggagttagtaatggcagaaatgttccacgaggaagacgctgacctggcgcccatccagtcgaagacggttgccgtcatcggctacggctcccagggacacgcccatgcgttgaacctgcgcgacagcggcgtgaacgtcgttgtcggccttcgcgagggttccgcgtcaattgccagggccgaggaagccggtctcaccgtcaagtccgttgcggacgcggtgaaggagggtgacctggtcaccattcttgctcccgatcaggtgcaggcagccctgtacaacgaggtcatcgagccgaatctgaagccgggtgcggcgctgctgttcgcccacggattcaacatccacttcgattacatcaagcccgcggccggtcatgacgtcatcatggttgcgcccaagggcccggggcacgtcgtgcgtcgtgagttcgaggccggccgtggcgtgccggtgctggtgtgcgtcgagcaggacgcctccggcgaggcatggccgctggtgctgtcgtacgcgaaggccctgggcggcctgcgcgccggcgccatcaagaccagcttccgtgaggagaccgagactgacctgttcggcgagcaggacgtcctgtgtggcggcctgtcgcggctgatcaccaccggctttgaggtgctgaccgaggctggctaccagcccgagatggcctacttcgaggtctgccacgagatgaagatgattgtcgacctgatttacgaaggcggcatctccaagcagcgttggtcgatttccgacaccgccgagtacggcgactatgtgtcgggtccgcgcgtgatcgacgagcacgtcaagcagaacatgaaggccgtgctctccgatatccaggacggcaccttcgcccgccgcttcatggaggaccaggctgctggcgctcccgagttcaagaagctgcgcgccgagggcgagaagcacccgatcgaggccaccggccgcaagatccgtgcgctgttctcctggggcgacgaggtcaaggacgccgattaccacgagggttccgttgctcgttgagtaattgattgaacgaaggccgggggccggttccgcattgcggggtcggtccccggccttcgttgtgggttcgggtgggggtcgtggggggatttcccgaacgctggtgtggggttctcgtcccgggtggtcccggtggtgcgcggtgggggtgtgggttagctgttggggacgaggagggagtggagttcgatgacgtcgagggtgggtgcggtggcggggcgggtgatggtttcggtgccggtgtgtccttgggcggtccaggtgatggtccaggtgcgggtagcggtgatggtgtagtggccggggtgttggtagctggtgccgcagactggtgagggttggttgccgttggtggtggtgggtcgtgggcgtccggtggtgcagcggatgggggtggtgtgggcgccggggttgatggtgcccgggttgatggtgacggcgccgggggttgcggtcagggtgatggtgatgtctgtgttggtggtggtggtgtgttgggggccggggttgtcgagggtgaaccacagttgttgtcccaccgcggcggcgtgccattggttggtggtggggtcggggtcgagtttgatggtggtgtcgggcagggtcatggtggcgatcgcgtggtgtgcggtggtggcgatcgtggtggcggtgttgggtgtggtgcagtcgatgccctggctggtggcggcttgtttcttggtttcgggggtgaacagggctccggtgttggcggcgggtttcatgatggtgctgcagggggacagggcccagcgggtccatgcggtggagtcgaattctgttgcggtggtgcctgcggtgttggtggttgcggtgctgccaccggcccacgcctcaaccgaaatcgaattacccgactgggaaagaccagtgctctcactttgccggcggtcgaatccgggacttcccacatcagctaaggcagccattggcgtcaagcagcaggcaacgatgacaggaactgccagcttgatgaacttcatgcggccagtggacatgaatcaacctttcccgaggtcgtctcgaagatcttcagcttcccgtccttgtcatggtcgaggaacaggatctggtgcaggacgttgtcacttccctcgatgggattcccctgtgcgttcagttggggactctgacgggcatcaatacagcgttcaatgacaatctcggcacgagcgtcggcttcagccagcgcgggcattttcggcccgtcatagaccgctgggccgatcaggatggccttggtgtttggggccgttcgctcgtggtcacggtggaccatctggagcaagttctcgacatagccccgcgcgttgcccatcacatactggtccatttcggcaggaagttctgtgactccgcccgccagtcccagagactcgtcgaggtcgaagaatccctggttggtgaccttggcctcttcgaacagggcgtcccgtgcggcactcaccgagttgtggaacgaggcggaggccttctccgaggccgaggggccactacaggccaccatcgacgacatcatcacagctgccagggcaatggccccggcacgcattgatcggatggacatccgcatcgagctcccatgatcgacgagcagttcgcgaacatcatggcatgcaaaaccggcagaattgcacccacaaagtcacaaagctttcggcagccgggcgatccacctagtcagaacacagatcaggcacgcaaaatagttatccacaagctggtacttcaggtgggaatgtggcacggttcccgggctcggggtcccgggtgcggacacgacgatggcccgcgactccggggagccacgggccatcatcctcgatcccggaacaccgggatggtgcccaactcaggccaggcgggccgcgatcgcatcgccgatctcaacggtgctgcgcttggcaattccacgctcggaaatatcggcactcacggcgtcattcacccgctgtgcctccttctcgtatcccaggtgcgtgagcaggagcgccatcgagctgatggcggctgtcgggtcggcgatgcccttgccggcgatatcgggcgccgaaccatgcacgggctcgaacatggagggataggtgcgcgccgtgttgatgttggcgctcggagccagtccgatgccgcccgtcaccgctgcggcctcgtcggtcaggatgtcaccgaacaggttgtcggtgacgatcacgtcaaagcgctggggatcgacggccaggttgatcgtcgccgcgtcaacgtgcaggtagtcatgctccactgaaggatattcggtggcgacctggtcaacgatgcgactccacaggcccccggcattcaccaggacgttgtgcttgtgcacgagggtgaccttgttgctgcgcttggtggcgagctcaaatgcatagcgcacgacgcgttccacgccgaacgcggtattgatgctgacctccgtggccacctcgttgggcgtcccttggcgcagggtcccgccattgcccacgtacatgccctccgtgccctcgcgcacgaccacgaagtccaccggtccctggtcgagtaccgcttgggacaggggggttacgacgccgggatagatcttcgacgggcgcaggttcacgtcctgatcgaattcaaagcgcagcttgagcagcaggccgcgttccagcagtccggagggaatcgtgctgctgccgggcgcagcgcccacggcaccgaggatgatcgcgtcacgggtggccagatcggcgagggtctcgtcggaaagcatctcaccggtatcgagccagtgctgggccccgagttcgtactgggagaactcgaaggtgtcctcacccgccgctgcgataaggaccttgacggcttgggccaccacttcggggccgattccgtcgcccgggatgactgcaatgactggcttgtgcgaagacttactcatggttgtcacactaagtgtccccgcaggaggaccatgcgcggtctcagccctgacgaaacagcgaactacggcgttgcagatggctaatcagcgcaacctcgcaccctccaaccgacagatgaacggccggttgtcgggccgtgggcgcgcagtagcctgaagtcatggcactgaagttcaacgcaccgtccgaccccacgtatcgtactgaggcggacatcgcaaagatcaacgaggaccccggcttcggggtgcacttcaccgatcacatggctcgcattgactggagcgaggatgagggctgggttgacccccgactcattgagtacgggcccatcccgatggaccccgccggtgccgtattccattacgcccaggaggcctttgaggggctcaaggcgtaccaccgcgaggatggctccatctggctgttccgtcccgagcgcaacgcggcgcgcttcttcaattccagcaagcgcctggcgttgccgcagctgccggtggacgacttcgtgcaggccgttcgtgagctcacccgcctcgatgcccgctgggttcccaaggagggcgagaagagcctctacctgcgtcccttctcgatcgcgaccgagagcttcctgggtgtgcggcccagcaagacggttgccttctgcgtgatcgcctccccggtgggggcctacttctccggcggcgtcaagccggtcgacatctgggtcgagtcccacctgagccgcgtgtccaacggtggcaccggcgacgccaagtgtggtggcaactatgccgccagcctcgtgccggaggagaccgccttcgcccatggctgcaaccaggtgatgttcgtcgacaacgccgagcaccgctgggttgaggaactgggtggcatgaacttcctcatgatcaccaagaacgacgagctggtcacgccgccgctgaacgggaacatcctgcccggcgtcaccagggattccctgctcaccatcgccccggagatgggactgaagcccgtcgagcgtcccatcgacatcgccgaggtgtacgccggcatggacgatggcaccatttcggagctcttcgcctgcggcacggccgcagtggtcacgccgatcggctcgctgaccaacgaacagggtcgtcacgatatggcggtccccgccgatggtgggcgaaccattgcgctgcgcaactacctgttggatgtgcagtacggacgtcgcgaggacacccgcggctggacccagcgcgtcgtctgagtcgcgcggtcgggcagaggggatcacacacatgaccatgaatccagtgcgcccggagaagctgcacatctacgacaccaccttgcgggacggggcccagcaggccggcatgcacctgtccctggatgacaagttggccattgccctgcaggccgacgccatgggcgtcgacttcattgagggcggctggccgggcgccaatccgattgacaccgagttctatgcgcgcgcgcccgaactgggcctgcgcacggcgaagctcgtggccttcggatcgacgcgccgcgccggttcacgggcgagcgaggatccgttgctcgaggcgctgtgtacggccggtacggattatgtgtgcatcgtggcaaaggcccacgacgtccacgtgacccaggcgctgcgcaccaccctggacgagaacctggcgatggtggccgactcggtgcgcttcctggtggggcacggcaagcgggtgctcgtcgacgccgagcactatttcgacggtttccgcacgaaccccgcctatgccctggaggtcgtgcgtaccgcggccgaggccggtgccgagaccgtggtgctgtgtgacaccaatggcggcatgctgccccactggatgggtgacatcatctcggcgacctcgtcgatcggcgtcgagctgggggtccattgccacaacgacagtggatgtgcgctggccaattcgttggccgccatggacgccggcgtcacccacatccagggcaccatcaacggatatggcgagcggaccggcaacaccgacctgaccacgctcatcgcggacctccaactgaaatatgagtggcccgtggtgacccccgagcaactggggaacatgaccagcgtcagccgcacggtggccgagatcgccaaccagccggtctccgcgcggcagccgtatgtgggggagtcggcattcgcccacaaggcgggcctgcacgccagcgccctcaaggtgaacaacgacctctaccagcacatcgatcccaccgcggtgggcaacgacatgcacatgctcatctccgacatggccggccgcgcgaacatccagatcaagggcgaacagctgggcatggacctctcggaccgcgaccttgccgggcaggtggcctcgttggtcaagcagcgcgaggcccacggctacgcctatgaggccgccgacgccagctttgagctgctcgtgcgcgatacgtgcggcgagctcaatgaccgtcccttctcgatgaccagttggcgggtgtttatcgagcagcgtggttcctccgaggacgacgcctacaccgaggcgacggtgaagctcgaggcccagggttcaccgcagatcttcgtcggcgagggcaacggcccggtgaatgccctcgaccaggcccttcgccgggccctgcgacccgcctatccgcaggtgcgcgactacgagctcaccgattaccgggtgcgaatcctcgacgaggaccgcggcaccgacgccaccgtcagggtgcagatcggtaccacctggcagcacgacacctggaccaccgtcggggtcggcgcgaacatcatcgaggcgagctgggaagcgctgtcggacgcctacctgttcggcttgttgaagggcttcggcgccgacgaatagtccccggggctgcccggaacgccgaggcccccgggcggcccgacaggtaggtttggctcatgcgtattgctcgttatgccagcccgggaactgatccggcctatggcctcgtggaactcgtcgatgacgggggagatcaccccgatacggtcgcaacactcaccggtgatcccctggcggggcccgtcaacctcaccggagaacggcaccccctggccgaggtgcgactgctcgcccccgtgatcccgcgcagcaagatcgtgggcgtgggacgcaactatgccgcccatgccgccgagctgggcaacaccgtcgacgccaacccgttggtcttcctcaagcccaatacgagtgtgatcggtcccgacgaccccatcatcaagccggtggagaccgacgacctgcagttcgagggcgaattggccgtggtgatcgggcgcatctgtcggctggtgcccgtcgaccgcgtcgccgaggtgatcttcggctacaccgtggccaacgatgtcaccgcgcgggatgtccagaagaccgacaagcaatggacccgcgcgaagggctgggacagtttctgccccctcggtccgtggatcgtcagccacctgagcctggacgaggcggcagcactggacgtcaccaccacactggatggcgaggtcaagcagcacggatccaccgccgacatggtccactccatcccggagctggtctcctatatttccggattcaccaccctgctgcccggcgacgtgatcctcaccggcacgccggcgggcgttgcccgcatggtgcccggccagcgggtgagcatcgagatcggctcgatcggagccctgtcgaatcccatcgtcgacggggcgcagacgctcggttacggcgacgaggaatccccggcggggcagtgatcacacagtgagccagaagaagcgcaagcaggcccggacgtccccgaaggcatcgggttcgccccgtcccgggacatcacagggagcacgccaggccccgcgcagtggaagcgcgagcgcctcgcgggtggggagcgctgggcgcggatcggggcggttgcagcccgactacccctatcagccgatgttcacgatgcccgccagtgagccgatgccgggcgtcgactatgcgttggtgatgcgctcgcccgcgcccgggggagcgatgagggccattacgggcctggcgctcgtggcggcggggtacctgctgatcacccagatcctgctctacctgggcgcctggctgtcatggctggcacggggacaacacggcagcatgcaggacggctatgccgccgtggccggctatcaggtgcccgagggcatcgtgatcgtgaacctggccctggccgcggcgatcatcgtcgtgctcgtgattgcccgctggtgcaatggccgtcaaccgggctggttggtctcggtgcgcccggggatgcgctggggattcctggcatgtgccgtcgtggtgggcctggtggtgctcaatggcatctacctactggcgcccgcgcgggcggccctgcactggaacccgccatccaatgcctggctgttgatggtgctggtcgtggtcacctcgcccctgcaggccgccggcgaggagttcctcttccggggctacctgcaacaggccctcggtgccctgaccggtaggtcctgggtagcactgatcgtctcggcgctcgtcttcgccgcgatgcatggttcgcagaaccttccgctgttcatcgaccgcttcggcttcggactgatcgcgggcggcatggtgctggccaccggaggacttgaggcatcgatcgcggcgcacgcggcgaacaacgtcagcagtttcggctacgcgatcgccggtggcaccctcgcccagacccgacagatctcggcaagcaactgggccaccaccgggagcaatgtggtcggttatctcgtcaccggagtggcgatggtcgccgtcgcgcgcctgctgcgcctgcgccgggtcaccccggataccccaagttgatagttccgaaccgattctgtagagtttgtgggcgttgtcaccgcggaaacgcaaagggtgacgatggggtatggggtaattggcagcccgccggattctggttccgtcagtccaggttcgagtcctggtaccccagcgcatgtgggattcggagcagttgtggtccggtccgcatacgctggaacgacaagtgaatagctaagcgtccgaatcacttcggacaagacttggccccgttgtgtagcggcctagcacgcggccctctcaaggctgaaacggcggttcgaatccgctcggggctacaagtgagtgaaggctcccacctgatcaggtgggagccttcactgcgttgtcgtcgggggtgaatgttgccggagtggatcgcctggcgccgaagccgctcagccctccgagaccgcggccctgcgcagtacctcggaaaggtgctccgcagcggcgatcaccgccggggcatggagtcggccgggctggcgggtcaggcgctcaatcggtccggacaccgacacggcggccagtacctttccggcgggggcccgcacgggcgccgacaccgacgccacgccgggttcacgctccccaaccgattgtgcccaaccgcggcgacgcaccgtgttcagtgccaccgcggagaagctcgcagaggccaggccggcctggatgcggtcgggatcgtcccaggccaacagcacctgcgcggcggaaccggcgttcatggtgagttgggcacccaccgggatggtgtcgcgcagtcccgacgggcgctcggcggccgccacgcagatgcgcacatcgccctgccggcgatagagctgggccgactccccggtgatgtcacgaagccgggcaaggatcggtccggcggtggccaacaggcggtcctcgccggccgcggccgccaattccaccagtctgggtcccagcacgaagcggccctgcaggtcgcgtccgaccagccggtgatgctccagtgcgacggcaagacgatgcgccgtcggacgggccagtcccgtagactggaccaggccagccaatgtcgtcggtccctgttccagggcacccagcacgagcgccgccttgtcgaggacgcccaccccactcgaattgtccatagagtgagattatcatctcgtattctggtatggcaagggcataatgactgtcatggcatcaacactcgtggaaaaaatctggaacgatcatgtggttcgcagcaccgcgggcgagcccgacctgctctacatcgatcttcagctcgcccacgaggtgacgagcccacaggctttcgaggggctgcgtctggcgaaccgcagggtgcgtcatcccgaactgacggtggccaccgaggaccacaacatccccaccacaaacgtcttcaagccgatcgccgaccccgtctcgcgcacgcaggtggagaccctgcgggccaattgcgccgagttcggggtgccgatccactccatgggcgaccgtgagcagggcatcgtgcacgtcatggggccccagctcggcctcacccagccggggatgaccatcgtctgcggggattcgcacaccgccacccatggcgccttcggagccctggccttcggcatcggcaccagcgaagtggaacacgtactggccacccagaccctgccccaggcccggcccaagaccatggcggtcaacgtcgtgggcgacctgccggacggcgtggggcccaaggacctcatcctggcgctgatctcccaggtggggaccggcggcggtcaggggcacgtggcggaataccgcggcaaggccatcgaggacatgtcgatggagggtcggatgaccatctgcaatatgtccattgaatggggtgccaaggcgggcctgatcgctcccgaccagaccaccttcgactacgtcaagggccgtgagcatgcgcccaagggcgctgattgggacgctgcggtcgagtactggaagggcctgcgcaccgacgacgacgcgaccttcgacgtcgaggtgaccctggacgtcagcaagctgaccccgttcgtcacctggggaaccaatcccggccagggcgttccgctgggcgccaatgtgcccgatccggctgccttcgataccgaggtcgagcgcgcggccgcgacccgggccctggagtacatggggctgaaggccggcacgccgatgcgtgacatcgccgtccagacggtcttcatcgggtcgtgcacgaacggtcgcatggaggacctgcgggcagccgcctcggtgatgaagggacacaaggtctccgattcggtgcgcgtattggttgtccccggttcggatgccgtgcgcgagcaggccatggccgagggactcgacaaggtgttcaccgatgccggagccgaatggcgccatgccgggtgctcgatgtgcctggccatgaacccggacaagctggcccccggcgagcgcgccgcgtcgacctcaaaccggaacttcgagggccgacagggcaagggtggacgtacccacctggtgagcccggtcgttgccgccgccaccgccatcgccggtcatctggccgcccccgccgacctgtcataaagaggaaaccatcatggataagttcaccacccacagcggcgtcaccgttccgctgcgacgcagcaatgtcgacaccgaccagatcatcccggccgtctacctgaagcgggtcacgcgcagtggcttcgaggacgggctgttcaagagctggcgcgacgaccccgatttcgtgctcaaccaggacgcctacaagaacggcacggtgctggtggtcgggcctgatttcggcaccggcagctcacgcgagcacgcggtgtgggcgcttcagaactatggcttcaaggcggtcatcggctcacgcttcggcgacatcttccggggtaatgcgggcaaggccggccttctgctggccaccgtccccccggaggtcgtcgaggagctgtggacctatgccgaggacaatcccggtgccagggtgaccgtcgacctcgaggctcgtcggctcactgccggcgacaagtcatatcccttcgatgtcgacgactacacccgtcaccgcctgctcgagggcctggacgatatctcgctcaccctgcgccacgaggatgacatcaaggcttatgaggacaagcgtccgagcttcaagccggtgaccaccgaggtcgcctgacccgacatccggtcacaattcgtccgcacggcccggctgccactccttgcgggggcagccgggccgtcggcatgtcaacggccggaccagccccggtacccccccgcggtccggcgccggggctgtcagaatggtggccatgaacagcgatgtcgctccggataggcgcctgtacctgggcaggttgggacgggcgaaccacgagccggcaaatcgcacgttccgcttcgcggcccgcctggcaggggtcatcctcaggcccattgcccggctgcacctttcgggtcaggagaacctgccgacaaccggtgccgcgatcatcgtgccgaaccacctgtgtgacctggaccccctcgtggtgggctacttcctcgtctggggtggtcgatggccgcacttcctggcgcgggccaatctgttcaccatgccggtgctcggccgcctgctgagggccctggaacaaatccccgtcgaaaggggctcggtgagtgctgccgggtccctggccgaagcccagcacgagttggaggcgggcaaggtcgtgatcgtgtatccggaggggaccttcacctacgatcccgatgagtggccgatggccggccacaccggcgccgcgcggttggcgctgcggaccggggcacccgtggtccccatcggccagtggggcgcaaacttcatcattccgccgcgccacaagcgtcgaccgaagctcctggggcgaagcgatgtcacagtgcatgccggcgcccggctcgacctggccgacctcgtggcgcggggcgagtcggatcgacatgccgtccatgacgccacggtgcgcatcatggacgccatcacccatgaggtcagcgccgtccgggacctgccggcgccacatggacgttggcacccgggccgcaagaagcgggtcgatccggcgcaggcggtgctctagcgccagcgtttccgctcgccccggacccgtgggggatcgctactctttgcaagagcacttcggaaggaagcccatggcctcggatactgcagacctgatcaatgtggccgtcatcttcggcggccagtcgaacgagcacgaggtgtcgtgcctcacggccgccggcgtcctcggcgccatcgaccagacccgctaccgggttcacgggatcggcatcgacaagtcaggtctgtggcaccgctactcggtcgacgagattcgtgccctgcagatcgtcgacggcgtgatgccctcaattggcgcggaccatccgctcgcggaactcttccgcgacgccgggggagtccacctggcgaccctggatgaggatcggctcactgcccgcgagcccatcgacgtcgcttttcccctcatgcacggcgcctacgccgaggacggaaccgtccaggggaagctggaaatgctcggcctgaagtatgtgggctgcggcgtcaccagcagcgccctggggatggacaaggagtacacccacaccgtcctcgaggcggcgggagtccccacggctgcctgggtgcgcgtgggacgcgacgaatggatgcgtgatccggatgccatcgtggcccggatcggcagccagctcggctatccggtgttcgtcaagcccgcgcggggaggatcctcggtgggcatcagccgcgtcaccgggccggactcgctggccgccgccatcgacgcagcgcgcctggttgatccgaaggtgctcgtggaacaggcagtggtcggtgcccgtgaggtggagtgcgggatcctcggcggggatggcacggccccccgcgcgtcgcacaccggcgagatcgtcatgcataccgaggaccgcttctacgactaccgggcgaagtacctgcccgaggaacaagtcgacctgcgggtgccggccggactcgagccccaggtggaacggcgggtccaggaactggcactgcagtgcttcacggccctggactgcgaggggctggcccgcgtggacaccttcgtcctgcccgatgggcaggtgctgatcaatgagatcaacaccatgcccggattcaccaagttctcgatgtatccgaatatgtggcgggccagcggaatcgactaccccgagctgatcgaccagctcatcgccctggcgctgtcacgcccggccacggtgctgcgctaggggcagtcaccgcggcgggcgccacagcgggggattgctcaggagcgtgcggttgccggctgcgggtgcgccaccggcccggcgacctcgcgagggccacgattctgcgcaacgacctgctggaatgccggaagctgggtgtacagctcatcggtcagcggattgcgtcgacgcctgatgatggtgcgcagctggtaggccgccacggcgacattcgccagcagcgccaccgccgacacggtgaacaacgccaccgggcttcccgaggcgtccaccgagaaccgggaatcggtcacgaaggccggcacggccatggtgaacatcatccacagggcaagggttccggcccggtgctgcagccatgcgcccttcttgatgaagaaggcgggaatcgtgcatgaaatgagcagcgccgcacccgcatagaaggaatggtcacccacgcagttgtagacataggcaaagttccacaggtcgtaggcgatgatccagaaccacaacatgtcgggccagatcatgtccttcgacttgtcgcgggagatgaagatgccgaaccaaccgcagatggtgagcaggttgagcagcccggcgacgccgttcatccagttccacggccccgacagcatgtagacaccatcgaccatcccgttggcatgcataccgcccacctggaagtcacggatgcaggcctcgaggatgttgatcgcgaggatgaggggcgggaagcacagcgcccacttccgcgccgcgagccgggggtggtagcgcagtgccatgaaccccagtacgccggccaatgccgaatagaccttcacccagtggaaccaggtacccgttgaggatccggcgccggccgaggtgggccacacgaagatcgtcaggatgatgggaagcgccacgaaaatggcgagtcccgcccagcggaaccgtcgggtgagttcattgagcccgatgagggctcccagcacgacgaaccatgccacccatgagtaccaggggatggaagcgaataggaacacgtctctgtcctccatcgtcacgaggcccctctccaacgagcggcccctgtaggcggcacgttacggtgggcgtgcgcgccgcgcgatggacagatttacgaaagtgtccagtggaggaccgaccatggtggacccaccccgcaccgatgccttccggccgggcccgagcgggccgattgaacccccggaggatcccccggcccccgagtcgccggcccgacgcccggcgcgcgacgcgctgggagaagccctcaagcagaccctggcaaccaccccgctcgacaaggtgaccgttgcggggctcagccgcagtgcgggcatcacccgtcaggccttctactaccacttcctcgatgtgagtgacctggcagtgtgggtattcaccaacgaggtggccagccacatcatgaaatatcggtcgcgtgcggagtgggcggacggattcctcaagctgttgctctacatgcaggaacaccgcgaacagagctattcagtgattcgcgccctctcgtcggtttccctcgagcagttcttcttccggcacctgcggaagatgatgacggcgatcgtccacgaggtggagcaaaccctccccttccacgcgggccagcccctcgcccgccgcgatcgggacttcgtgatcgaccactacacgctcagcgtcgtggggcacctgctgcactggctggccaccgacatgcaacaaccgccgggggagttggtacagaacctgcgcgacatcctcgacggcagcgttcgcgcctcactggagcgctttggccaccacgatgccgacggacccacgaccggtgacccggaccggtgcgttgaggggacggtcggcccccgggcaggctagcgtttagcccatggcgtccgagacaacagggcagaacccgcagaccgcgtccgaggtcggcgaattcgggatcatcgcgacgatcatcaagggccttggtcgtccgcccgcggtctcggtgggccccggcgatgatgccgcggtgttcctggtgaatggctcggccgtcaccagcacggacatgctcgtcgaaggcgtggaatttcgtcgtgactggtccagtgcggcagaagtcggtcgcaagtcggtggcggtgaacgtggcggacctggaggccatgggtgccaagccggtggccatggtgatcgggttcgggatccccgcggacctgcccgccgagtgggttcgtgaattcgccaagggggttcgggccgaggccgacctggcgggtatcgccctggtcggtggcgacatcaccgaggctgacaaggtcaccatcggggtgacggtgatcggcgagaccgcagggctggacccggtgttgcgcaatggcgccgaacccggggagatcgtggcggtgtgtggccgacttggttgggcggctgccggactggccgctctcgaacgtggcttccgcagtccccgcgccgccgtcgacgcccagcgtgtcccgtcagtgccctatggggcgggacggatggcggcacgggcgggcgcaacggcgatgctggacgtctccgacggcctgttggccgacctgaaccacatcgcccaggcctcgggagtctggatcgacctcgattccggggcgttcgagatcccggaacccgttgcggtggttgccgcagcggtgaacaaggatccgcttgacttcgtgttgaccggcggggaggaccatgccctggcggcgtgtttcccccccggtgaactacccgagggcttcaccgcggtcggagtggtgcatgcgcccgggcaggacgggcccggtgtcactgtcgacggtcgtccccatgagggccatggcgggtgggaacacttccagcacggtcagtgacaggcgggggtgtgccgcccggcggcgtgccccaggggcgccggagccggcctccgagtagtctgcggaatatggcgacccgcgcgtcttccccgtcgcggcctcgcagcaagagcggctcgaagaactcacgccgccctgcgagtgcgcgaagcggtgggagcaagaagaacaatcacagtcggggttcggcgtcacgccgtccccggccgaccgcgccacgcccaaatccggtgctccgtgccgtggtgttcgcgtggcagggcatcgcccatggactcggggccgccgtgcgccgtatcggcggatcggcccgtgagatcgacccagcggtgcgtcgcgatggcatggggctgttcctggtggcccttgcggttgtcgtggcggccgagttctgggtcggcctgcccggagtggtcgggcagatcctgcaggcgtgcgtcgcgacgatcttcggtatggcgagctatttgctgccggtgctgttgttcgtgctggcctggcggaccctgcgcaatcccgattcgaacggccccgtcgggcgccaggcgctcggctggaccgtgctggcattcggcctgctcgggctgatcaatgtcaccgaatggcccctgcccagtccggccgatccggcgcgcatgcgggccatgggcgggatcatcggctacatctccagctcgatgctcacccagctggtgccgcgctggctcagcgccgtgctgctggtcatcgtcgccgtattgggcaccatcctcatcacgggtcgtcccgtccacgagctgtgggcccagatccggcagctggccagcggggcatcgtcctgggcggccgacaaccgtgccaagaaggccgaacgcaagctgaagttcggcgtcgacgaggcctacgacaccccggtggaggacgaggaccaacatcccgcatccaccgagccacatgcggaccccgtggcgccacgtcccgacccggcgcacccggccgcggcggtggtggcccccgacgacctggagccccccgagcaccttccggcgacgagcagggtggaacaactgcagctttccggggacgtgcagtattcgttgcccgagctcagcctgctgaaacccggatcggctcccaaggtgcacaccgatgcggccgatcacaccgtgaactccctgcaggacgtgttcaccgagttcaacatcgatgcccaggtgacccgctacacgcgcggacccaccgtgacgcagtacgaggtggaactcggttccggcgtcaaggtcgaaaaggtcaccgccctgcaacgcaacatcgcctatgcggtggcgtcgcccgatgtgcgcatcctgtcgccgatccccggtaagtcggcgatcggtatcgagatccccaacaaggagaaggaagtcgtctccctgggcgatgtcttgcgcagcccgcgggcgcgcagcaacaccaagccgctggtggtcggactcggcaaggacgtcgaaggtcgggtggtgcttgccaacatcgccaagatgccgcacctgttggttgccggtgccaccggatcgggcaagtcgagcttcgtgaattcgatgatcacctcgatcatgctgagggcaactcccgacgaggtgcggatgatcctggtggatcccaagcgcgtcgaactcaaccagtatgagggcatcccgcatctggtgacgcccatcatcacgagcccgaagaaggcggcccaggcgttggaatgggtggtccaggagatggaccgccgctacgacgacctggcggccttcgggttccgccacattgatgacttcaacaaggcggtgcgggccggccaggtgcaactaccgcccggctccgaacgtgagctgacgccgtatccgtacctggtcgtcgtggtcgacgagttgagcgatctcatgatggttgccccacgcgacgtcgaggattccatcgtgcgcatcacgcagctggcccgggccgccggcatccaccttgtgctggcaacccagcgcccctccgttgatgtggtcaccggactcatcaaggcgaacatcccgtcgcgcctggcctttgccaccagttcggccacggactcccgggtgatcctcgaccaggccggcgctgagcgcctgctcggtcagggcgatgggctgttcctgcccatgggggcggccaacccgaagcgtgtccagggcagctgggtcaccgaggccgagatccgcgaggtcgtcgaccatgtgaaggaacagctcaagccccagtaccgcgacgacgtcacggccgtggccagcgccgagaagaaggtggccgaggacatcggcgacgatctcgacctggtgctggaggcggccacgaatgtggtcaacctgcagctgggttccacctcgatgctccagcgcaagctgcggatcggctttgcgaaggcgggccgcatcatggacatcctggagaccaggggcgtcgtgggaccgagcgagggcagcaagccccgcgacgtctatgtcaagcccgatgacctcgacacggtgctcgcccagctgtcgggcgaaccacaaccggaatcggccacccagtagtcggcattgacccgaccggcaggcgcatctgtggtgcggactggggttgacgccttcgggcggggatacttgaggcatcatggcgaataagaaggttcatctcatcagtctcggctgcgcccgcaacgacgtggattccgaggaattggcaggacggctggaagccgggggcttcagcctggtggatgagcccgacagtgctgatgcactgatcgtcaacacctgtggcttcgtcgagcaggccaagaaggattccatcgacacgatcctggcggcggcggacctcaaggacagtggcggccccaggaccgtggtggcggtcggttgcctggcccagcgctacggcgccgaactggccgattccctgccggaggccgacgccgtgctgggcttcgacgattacaccgatatcgccgagcggctgcgcaccgtgatggccgggggcacggtgcaaccaccgaccgtcatggaccgacgcaccctgttgccgatcgccccgattgagcgccaccggcgccgggcggtgcccggacaccagggagaactgcccaccggcatcgcccccgcctccggcccgcgcgttccacgccgccggctggacaatgcgccctgggcccccctgaagattgcctccgggtgtgacaggcgctgtgccttttgcgccatccccagcttccgcggcgcatatctgtcgcgggacgcggacgagatcgtcgaggaggccgggtggctcgtcgggcagggcgtgcgcgagatcatgctcgtctcggagaactcatcgagctatggcaaggacctggccgacctgcgggccctggaatccctgctgaagcggctgtcggccctggacgggctcgactggatccgcgtgagctacctgcaaccggccgagctgcgttcgagcctggtggacgtgatgaccagcacgcccaaggtgctgccctactttgacctgagcttccagcacgcttcggccccgctgctgcgacgcatgcgtcgcttcggcgatccggaatcattcctgggactcatcgattccatccgccaacgggcgccacaggcaggtatccgcagcaatgtgatcgtcggtttcccgggggagaccagcaacgacgtggacgtgcttgccgatttccttgcgcgtgcccgcctcgacgcagtgggtgtcttcagctactcggacgaggatggtacggctgctgccgagttgccggaccacgtcgccgccgaggagatcgaggcccgccacgagcgcatcgccgacctggcgaatgtgttgtgtgacgaacgggcggcgcaacgcgtcgggcagagggtgcaggtgctcgtggagggggtcgagggatcccaggtcaccggtcgcgcggcccaccagggacccgatgtggacggcacgaccaccgtgctggtcgggcaggggcgtcacatgccgacaccaggcgatatggtttccgcgtcggtgatcgacacggtcggagtggatctcactgccgaaatcgacgaggaaggctaggccgatgagcgcgcccgcaggtaggaaaccggatgaggccaccctcgcattcgcctggaacctgcccaacatcctcaccatcacccgcatggtgctggtgccggtctttgccgtggtgctcctcagccatcccgatcaggaggggtggcgcatcggtgcgacgctcgtcttcgccgtggcaatcctcaccgactttgcggacggacgcatcgcccgcaagtacaacatggtcacgaatttcggcaagatctgggattcgatcgccgacaaggccctcaccggtatggccttcatcggcctgtcaatcatcggcgagcttccctggtggctcaccatcatcgtgctcgtgcgggaatggggcatcaccctgatgcgcttccaggtgctcaagtacggagtgatggccgccaagcagggcggcaagctcaagaccttcctccagagcatcgccctgatcctgttcctgctgtggctgcccggcctgggggcctggtatgtggtgatcagctggatcgtcatgggggtcgccttcctgctcaccgtcgtgacgggtctcgactatgtcgtcgatgccatcaagctgcgccgcgcatcactgcaggtgggacatcccgtcgactacgccgagatcctgcgggcccgcaaggcccatgagtgactccaccgccgctgacggggctcggggtctcgccgagcaggtgatccatcggtaccgtgaccgctcgctgagcctggcgacgtgcgagtcgatcaccggcggcggcatcggctggaccctcacgatggtgcccggtagctccgaggtcttccgcggggggctcatcacctatgcaagctccctgaaggcccagctggccggggtggatgctggtttcatcgcgcgccacggggtcatcaacgagcagacggcccgtcagatggcggcgggcgcggcccgtgcgtgtgctgccgatgtggccgtgtcggtgaccggtacggccggtcccaccggtgaggacggggttgctcccggggtcgtgtggttgggcctgtcatggctcggcacggtacgagcccgacagctgcggctcgaaggcgggcgcgacgcgatccggcaggccaccatcgaggaatccctgggctatctgctcaaggcattgacctggccgcagtgagccgggtcatcccggtgcgggacctgccccggtagcaggtgaatcacgctcagcactggttgaaatgtccactatgcgagatgatcggatccaccagggaattaatcccatgcggatcaggtttgaatgggcagatactccattgcggagcgcgatcggagggcaacgtgaagccacctttgctgagagtcctactaggtcaaacgctgcgggaacagcggattcatgaccgccgcaccctgcgcgatgtctcgctggctgcgcgcgtgagcctgggctacctctcggaggttgaacgcgggcagaaggaggcgtccagcgagctgctgttctccatctgccaggcgctcaatgtgcccctgtccgagatcctgcgtgaggtgagcgagaagatgctggtggtcgaggccggccagctgcaggcttcgcgcatcggcctcgaggcagctgctccgtcggtcatcgccgcctgaacctgtcgcctgcgctgccgcaggtggcagcgcaggcgccggcatcgcggcgcaggacccaccgcagaggtggggaacctgtgacggcgagccgctgtccgccatggcgtgcggcgcgttgtgcggacgcgccgttgaagacccggaccaccaggctggtggtccgggtcttcacgctctgcggccgctggttcccaagggtctgcggccggctgtccggttcattcctggcggttgctccccggcgtcctgcggcgtcgggtgtatccccggggaaccatcacgaaacctgcggcattgagctcgtcgccgatgtcggcctgcagggcgggactgccatcgatcttgtcgatcgtgaggcgaccgatctgccctgcgtccacggcggcaccgattgcacgcagtgcctccgccaatcggggccggtcggtggaggtgaaggtcaacagggtccgggcccccctctcgacgtagcagacgggcttcgcgtcatcgagaaccaccagggcgcccgccttgcgagccggacgatgtccattggtcgcgggccactccagggcagcaccgtaggggttcaccggatcgcaggcagcgagaagtcgcatgggggcagccggagcggtgcggagccggtcgactgcgccgggggtcgcgaactgtgctccccccaggccggtcacgaaatagccgcggcgggtggcgccggactcctccatcctggacagcaggcggtaggcgtcggcgaagctcggtgtctgtggctcggtcatgacgctgccccgggtgaggacgccatatcgggccagttccagctccagggcgtccaggagccgggtgctctcgtcgccgggctcgggtggggcggcccagcgggccccgcccacgggcagcgggcgggcaacccggacccgcatggggcgacggcgtgcgcgcggggtggtgggggtcttcagggccccgcgtcccgcgcacaggtcacgcaccggcgcgaaggtgtcagtggtcgcacgtccctgccacgcaagctcccacagggcatcgagcacggccgagggcccggccgactcgtcggtcaggtcggtgacccgccaaccgccaccggcatccagtcgttgcgccagtcgggtggcgaggggcgtcagttctgtcgacttccggggagggaccgggccgatgtctgccggccacaggcagatccagccatcccgctgggcaatggccctggttccagtccagaccatctctccggtggcgagtgcctcatcgagcagggacgggcggtagccgggaagtcgcgccggcagcaccaccgactccagcatggatgcgggaatcggatagcccgcgatcaggtcgacgacggccagcaggtcgtcgggggtgggggcgctgtgacttgccgggcgttggggcacctgggccccggccgggggcagctgctgccaggcgtccaggaagcggccgaactgctgctggtcgacggcctccacctggttgcgcagctgcgcgagggtgcgacgcttgatcagcgcgagcacctgctcatgacagtactggtcggcgtcgggctccccgaccagcgcgcccagacggtattcggtcgaatcctcgccgggcgtcggcggaaccgcgatgagcgctccccggatgaccaggccctcatcgatcagcccgtcgagtgccgattgggcggtggcaacggccatgccgtagcgctgccggattgactcggtggtgaccgccgcatggcgtcgcacccagcgcagcaccagatcacggaccgcaaggtgccgctcacgcggcggtggcgcgggcatggccgcagggatcgggattccgagcgcatcgcgcagcagaccgacatcggtgtcggcgcaccaggccggacgaccattgatctggacccgcgcaatccggtgttctgccgacagggttcgcagccaggccgcggcgtccggggtactgcgatcacggcattcgtcgtcggtcaggggcccgatcgtgcgaatcacctcccacaggcgttcgggggttgtcgcacgacgatccgccaccaccgactggaggccggcctccacccgggtggccaccccgacgtccagcatctggcggccggcctcggtgcccaacagttcggccagcatgcccgaatccaggctcatggccgccagggtgcgttcggcaaggggctgatcggtgtcgtagacgaattcgccgacatagccgaacagcaggttgcgggcgaagggggagggttgttgggtctccacgtcaaccagtcgtacgcgccgtgaggcgatggccgacatcagggatgtcaggccgggcaggtcaaagacgtcctggaggcactcgcgcatcgtctccacgacgatcgggaaatcgcggtatcccgccgccacggcaagcagctgtgccgatttgatgcgttgctgccacagcggtgcgcgcgtgcccggattgcggcgcggcaggagcagcgcgcgggcggcacactcgcggaaccgcgcggcgaacaatgctgaaccgaagacctgctctgacaccagcgactcgacgtcatcggccgcgaaggacagcagccctgcgtcgggagcgtcggcatcgacgtcgggtagctggatgatgatgccgtcattggtggcagtgacgtggacgtcgacgccgtagcgctcgcggccggcgtgctcaatgatcaatgcccacggctgcagcaccgcggcccccagggcacagtgcacgcacaggcgccaatcgccgatctcgtcacggaagcgctcgaccaggatggtgcgatcatcggggagctgtccggtggcctcacgctgctcggtcagataggccagcagattccgggaggccatctcatccagccccccatgggccagccgggcgagggcatccccgggatctgccgccgccagctccctgacactggcgccgatggcggctccgagctcacgcggcctggacggggaatccccgcgccagaagggcaatcgacccggatggcccggagcaggactgaccatcacctgcgagtgggtgatgtcctcgatccgccaactcgaggtgcccagggtgaagacatcgcccacccgtgactcgtagaccatctcctcgtcgagctcgcccacccgccggccgggctcgtgcttccccgaggcggtttgctcgccgaccaggaacacgccgaacaggccccggtcggggatcgtgccaccactggtggtcaccaggcgccgggcaccgggacgtgcgctcagcatgtcggtgcggcggtcccagaccagcctggggcgcagttcggcgaagtcctcactgggatagtggccggtgagcatgtcgagcaccccgtcgaagacggagcgcggcagctgccggaaggcatcgcaatgcctgacgatcgtgaagagctcgctggccgaatgcggggcgttgacgcacatcgacacgagctgttgggccagcacgtcgagcggattgcgcagggtgtggacggcctcgatctgcccgtcggccatccttcgggcgacgaccgccgattccagcatgtccccccgcgccgtggggaacagcaccccctgcgagatggcgcccacctggtggccggcacggcccacgcgctgcaggccgctggacaccgaggggggcgattgcacctggatcaccaggtccacggcacccatgtcgatgcccagctccaacgagctggtcgccaccacgcacggcagtcgcccactcttcaggtcatcctcgatctgcgcccgacgctgtttgctcaccgaaccgtggtgggcactcgcaacgatggggacctcggtgccgtcccggcccttcgtggccgccgacggctccatcacctgggccggcagcggctgcggttcatcgctgacgcccagatcgtgggcatgcaattcgttgaggtgggcggtgaggcgctctgccacccgacgtgaattcacgaagcagatggtcgagcggtgggacgtgatgaggtcgaggatccgtcgttcgatcggcggccacatcgagggttggcgtccggtgccgtcctgctcggctgcatcccgcccggcgtcgggctcggtcatgtcctccacgggcaccacgacgctgagatcccaggtcttggctgccggggggctgatcaccgcgatgtcgcggtctcctgccagaaagccagcgacccgttccggtggacgcacggtggccgacagtccgatccgttggaatccgccgcgttggctcagcgcggccacccgctccaggctgaccatcaggtgcgcgccgcgcttcgtgcctgccagcgcatggacctcgtcgacgatgaccgtctcgacgttgcgcagggtctcggcggccttgctcgacaacatgaggaacagcgattcgggggtggtgatgaggatgtcagggggatgggtggcgatgcgtcggcgctgtgctgccgtggtgtcgccggagcgcaccgcaacgctgacccgcggttcgggtagcccaagtcgctccgcagtcgccgtcatgccgcgcaggggggcctgcaggttccgctcgatgtccacggcgagggccttcaggggggagatgtacaacacgcggacgcccttgacgtgcgcggcgggctcctgcgtcggtgcggccccctcggaggctccgatcagggcgggctgtgtcgcacgggatgccagccggtccaggctctgcaggaaggcggccagggtcttacccgaaccggttggtgcgatgaccaacgcgttgttgcccgagccgatggcctgccaggcggcgatctgcaccggcgtcggggcggcaaacacatcggtgaaccacgtgcgggcgatgggcccgaagccggccatcgccgcatcgttcgcgggcgccgttgcgtcggatgtcatgggagccagtctgacgcggggcactgacattttcgaatgggcgacgccgcgcacccggcgcggggggccagcgggatgacggcggagggcacgggcaggccgactaccgatcgcgttcgggaagctcaaggaacttccacacggcgcgccacgccaccttgaacggcacgccatcgtccagtgcctcacgcaccgtgcgattgtccagctccgacaacacgatctggtctgcccatacgcgcgcgtagttgccaccaagatggtgatccatccgccgccagaactcggtttctcgcacgggtcgagcttaggtcgccgggccgatgggtcgccggcaggtgccggtgaggggatcatggggcgtgtcgcttcgcttcgaacgcttgttcgcatattgtgaatagtgcttggcgctacgtccacagattcccggtggggcgggaaatgtcagaggccggtcctacagtcaacacaagacggcgcaagatggcgcaccacacgtgacacagcttgaaacagacgaagagaaccacgcacattccgttggccaccgtgccgacacgaggagaggatcgggacatggccgtagcagatcgaaacaaggctctggacgcagcgcttgcccaaatcgagaaggcccatggcaagggctcggtgatgcgccttggcgaccaggcctatgcgcagatcgagagcatccccaccgggtcggtggcgctcgacatcgccctgggaatcgggggactgccgcgaggtcgcatcgtggaggtctacggtcccgagtcatccggtaagaccaccgtggccctgcacgccatcgcgaacgcccaggcagaaggtggcatctgtgccttcatcgacgcggagcatgcgctggacccgagctatgcccatgcgctgggcgtcaacaccgacgaactgttggtgagccagcccgacaacggtgagcaggccctggagatcgctgacaccctggtccgctccggtgccctggagctgttggtgatcgactcggtggccgcattgacgccccgcgccgagatcgagggcgagatgggtgacagccacgtgggcctgcaggcgaggctcatgagccaggcgctgcgcaagatgacgggcgccatcaagtcggcgaacaccacggtgatcttcatcaaccagcttcgcgagaagatcggcgtgatgttcggctcgcccgagaccacgactggtggccgagccctgaagttctattcgtcggtgcgcttggacgtccggcgcatcgaatccctcaagaacggcaatgagatcgtgggaaaccgcacccgggtgaaggttgccaagaacaaggttgcgccgccgttcaagcaggccgaattcgacattctctatggcaagggcatcagtcgtgagggaagcctcatcgatatgggtgtggacgccgggatcgtgcgcaaggccggggcatggttcacctatggtgatgaccagctcgggcagggcaaggagaatgcccgcaccttcctgatcacccatcctgaggtcgccagtgatatcgagcacaagatccgggtgaagctcgggctggacgccagtgatgaggtacctgaggggatcgatcccaggaccggggaggtcgtggattccccggcgagcgagctggtggatgccaaggcgggcaagcagtcagcgtcgaagtccggtaaggccacggtctgatcgtggtgggtgacagtggttccgccgcggcgaagattgatgagcttgcacggctcatcagcgacgtcgcggcgcgaacccctgccgagcacgacgcatcaccgacagcttcgggcaagcgcggggcagccccgtcaggacgtgcctccgaggtggccagcgccaaggagatcgcgctgcgacgggtggaccggcgtgactactcgcgcggcgagctcactgattacctggtgcgcaagcgtcagctcgatcccgggatcgttgccgagatcctcgaccggttcgtcgaggtcggcatcgttgatgatgctcggttcgcacgcaactgggcacaggaacgcgcacgcacccgcaggctctcccggcgggccatcagtcgcgagctgagcgtccgcggagtcagcgaggagctcatcgagatcgccctggaccagatctcgcccgacgatgagcggcaggcggcgctcgagttgtgccgcatcaaggccagacgccttcatggggtcgaccggcaggttgcgctgcgtcgtctgtcgggacaactcgcacgacggggctactccacgggcgtcgccatgccggtgatattccaggtacttgacgagctggccgagtaggttccgcccggttcttcttgtccggcggggtgatccggcacggcctgcgggcccgcggcctaggacaaagcgcgggaatgcgagacaatcgggcaaggtgtgaatgcctcgcccatttccacgcctgtgaccccgactggcgatgaccgcaaggaggcgggatggggaccttctggttgctgctgttcgtggtgttgatcgtgctgctggtcgtcatcgtggcgatgggcgtggtggccatccgccgattgcgacgcgggccactcgaggacaatgggcattccggctcgtccctgtcggagcccccacgcgatgacccccacccacagggcccagagccgtcatcggccgccgaggagaagcagtcccagatgctggctgccctggaacagcgaagtggcgtcttgcatgagcgttccctggcgttggatgagcgcgagacccgcctggaactcgaacgcggacgactgcgcaagttgtccgatgaactcgaatcgcgcagcgaacgattgcaggcccgcagcgacgccgtggaggatgcccgcaccgcggcggaagaggagctgagcagggtcgcggccatgagcgaggagcaggcgcgtcaggaattgctggaccgcgtggagcgctccagccgacgcctcagtgccgcgagggcccgcgagatcgagaatgccgccaagcgggacgcggatcgggtggcccggggcattgtgctgtccacgatccagcgcatcgccaccgatcagaccgccgaagcggtggtctccaccgttgacctgcccagtgacgagatgaaggggcgggtgatcggacgcgagggccgcaatatccgctccttcgagcaggtgacgggcgttgacgtgctggtcgacgacaccccgggctccatcctgctgagcagcttcgatcccgtgcgtcgcgagatagcccgactggccatgcaggagctcgtgggtgacggtcgcattcacccggcgcggatcgagcaggcatattcgcgcgccgtggacaaggtgcatgacaaatgccaggaggcggcccagagcgcgatcatggagctggggctggtagggatcaatccgggcctgtaccagtacatcggggccctgcagtaccgcaccagttacgggcaggtggtgctcgagcacctgaaggaatgcggacggatcgccggtgcgatcgcctcggagatcggacttcccccggattcctgcaagcgggcggccttcctgcacgacatcggcaaggccgtcatcacccagggcgacggatcccatgccgcagagggcgcggaactcgcacgccgcttcggtgagagcgatgccgtggtgaacgccatcgcgtcccaccacgacgaggtgccggcggattccgctgaggcggtcatcacccaggtcgcggatgccatctcggcctcgcggccgggcgctcgtcgcgaaagcatggaggcgtatgtgcaccggctcacccgactggaacagatcgcgaccgcgcatgagggcgtcgacaaggccttcgccatgcaggcggggcgggaggtacgcgtcatggtgctgccggacgtcgtggatgatgcgggcagtgagcggctggcccacgagatcgcccatgaagtcgagagtgagttgagctatccgggcaatatccgcatcaccgtggtgcgcgaatcggtggccacccaattggcgcactgatcgcgtgggctacaggacggaggcaaggaactcctgggcccgtgatgtggccggatgctcgaagaactcggcgggcggggactgctccaggatgcggccatcggccatgaagacgatctgatcggcgacatgtcgtgcgaagcccatctcatgggtgacgcagatcatggtgcggtgctcctccgagaggctctgcatgatcgccagcacctcggcgaccatctcggggtccagtgccgatgtcggctcatcaaacaacatgatcgtgggatccatggccatgcagcgcgcaatcgccacacgttgctgttggccaccggacaactcagcgggcagcttcggcgcctgatcggccactcccacacggcgcaggaggtccatcgcccgatcacgggcgatctcgggggactgatgccgtacggcgcggggcccgtaggtgacattgtcaaggacggtcatctgggggaacaggttgaaatcctggaagaccatcccgacgtcggcacgcagcgccggcagttccttgcccccggtcggctgtggtgtgccgccgatgaggatctgaccggtgtcgggcacctcaaggcgattgatcgtgcggcacagcgtcgacttgccggaaccggagggtccgatcaccaccgccgtctggccgttggccaccgacaggtcgatgtcgatcagcgctgccttggcaccaaaggacttgttgaccccacgcatctgcacggcgggtgtgcccgcgggcccctgcgcggcgttgacggattcgtgcgcagcgccggcagctgcctgtgcggcgttgttgtcactcggctcggccatgtgtgaacgataacgccaccgtcacgatggggcgcgcacaacggggtgaacgcagattgcgcgtcgggattccccggggccgctggactacgatggagcggccatgttgaagcccgaatacacaccagccgtcgatgcccccagcgcgcccgcgcgcagctatcgggtgatcacctacggatgccagatgaacgcccatgactccgagcggatcgccggcctgctcgaccaggccggatatgtggcgctgcctgcgcacgagcacaccgagatcggcccggccgacgtggtggtcttcaacacctgcgccgtgcgggagaacgccgacaaccggctgtacgggaacctcggccggatggccaccttcaagaaggagcaccccggcatgcagatcgccgtgggtggttgcatggcccagaaggaccgtgacctcatcgtgtccaaggccccctgggtcgacgtggtcttcggcacgaacaacgtgggttcgttgcccatcctgttggaacgcgcccgcatcgagcaggccagtcaggtggagatcaccgaggcattgcagacctttccgtcgaacctgcccacgcatcgtgagttggactacgccgcctgggtgtcgatcagcgtcggctgcaacaacacctgcacctattgcatcgtcccggccctgcgcggcaaggagacggatcggcgacccggcgacatcctggccgagatccagatgctcgtggaccagggcgtccaggagatcaccctgctcgggcagaacgtcaacacctacggcgtcgagttcggcgatcgcggcgccttcgccaagctcctgcgggcgtgcggcgacatcaccggcctggagcgcgtgcgcttcaccagtccgcaccccgctgccttcaccgacgacgtgatcgaggcgatggccgagacaccgaatgtgatgcaccagttgcacatgccgctccagtccggctcggaccatgtgctgcgtgccatgcgccgcagctatcgctcggaacgtttccacggcatcctggagcgcgtccgggcggccatgcccgatgcggcgatcagcaccgacatcatcgtcggcttccccggcgagaccgacgaggacttcgagcagacgctgcaggcggtccggcgatcccgcttcaccaacgcctacacattccagtactcaatccgccccggcactcctgccggcgagatggcgaaccaggtgccccacgacgtggtgcaggagcgctatgagcggctcgtggccgtgcaggacgagatctcgtgggaggagaacaagctcctgctgggggccaacgtggaagtgatgttcaccaccggtgacgggcgcaaggaccaggccaccgaccggatctcgggacgtgctcgcgacaaccggctggtccacgtccgcgtgccgtccgaccctgccgaccgacctcgtcccggcgacatcggggaggtcacgatcacctacgccgcaccacaccacctggtggcggattcgccgatccgcaaccttcggcgcacgcgcggcggcgacgcctggcaggcgcatcaggaccagccggacgtcacctcgcgggcggtgggactggggatccctgcgctggccccacgctcccgatgacatcaccgctttctccggcgacgacgggcgcgtcggccgatggtgcacgcccggtgccgccgctcgtggtgctcatcggccccacggcgtcaggtaagtcatcgctggccatccagttggcccgatcgttggatgccagtgggcatccggccgagatcgtcaatggggactccatggccatctacgccgggatggacatcggcaccgccaagcccagcgcgtcagatcgcgcgctggtgccgcatcacctggtcgatgtgctcgaggtgacccagacctcaacggtggccgacttccagcagctggcacgtgaggtgattgcacgcctgcgctccagtggacggatccccatcctggtggggggatcgtccctgtacgtgcgagcggtcatcgacgacttcgagttccccgggaccgatccgcaggtgcgcgcccggtgggagcgcgagctggccgcccacggcgctgccgcactgtacgaggagctggttcgtcgcgccccccaggccaggggagcgatcgagcccgcgaacagccggcgcatcgtgcgtgcgctggaggtgttggaactcaccggccactacagtccgcacctgccgccaccccattacctgctcgtcaatgtgcatcaattcggactggtggtcgatcgggaggagatggaccgccggatcgaggagcgggtgcacgccatgttcgatgcggggttggtcgacgaggtgcgccgcctggagggccggggactgcgtcggggggtcactgccgccagggccctgggctatcagcaggtgctggcaatgctcgacggccaactcgaccagcagggcgccatccgggccacgatcgacggcacgcgcagattcgcgcgcaagcaactcggctggttccgacgtgacccgcgcatcgaatggctgcccgctgatggcacggaccttccgcaacgaatcgccgcgcggctgttcgcgcccgacgggggccattgaacgccggtgccacaatggcgttcatgaggaactgggagttcgccaagggccacggcaccatgaatgacttcgtgctgctcaaggatcggaccaacagcaccgagttgagcccccaggacgttcgctatctgtgtgaccggcgcgccgggatcggcggcgacggggtgatcagggccgtgtgggccaagtacatgcccagctggaccggcgatcccaacatgtggttcatggactatcgcaactccgacggctcggtcgccgagatgtgcggcaacggattgcgggtgttcggccacttcctgcttgatgagaacctcgccgacggacccgacatccaggttgccaccagggcggggcagcgcgatgtggcagagatgaacgacgagctcttccgggccggcatcggtcacgtgcaggttgcctcgcagcccacgcatgtgtccctggatggcgtggaatacgaggccaccaccgtggatgtcggcaatccgcacgccgtggtcttcctccccgccgacgtcgacctggaatccctggacctcagtcacccaccgcgcttcgacacccgtgtctacccggccggtacgaacatcgaattcgtgagggtgcactccgaccgctccctgtcgatgcgcgtcttcgagcgtggctcgggggagacgatgtcgtgtggcaccggggtcgtggcaacggccgctgctcagggtgcccggctgggtgagcagggacgtttcggggtggacgtgcccggtggtcacctcgaggtggagctcgacgactcgatggcccacctcaccggcccggcggtcatcgtcgcgcacggctcagtggtgctgcccgatgaggcggcacgctgagcggcttggtcctgcgtgccgggcgtgtcacccttgaggcacgatgacagatgagcacatgacggcgggcgttcccgaaccccacgagcgcgacaacgaagcgcgccatgacgtgaccgacgaactgctggacctcgaggagcgccactcgctgaccagggtggccgggatgtcgaccgagctccaggacgagagcgaggtcgagtaccgacagctgcgcctggaacgcgtggtcctggtgagcgtgtggaccacgggcacccaggccgacgccgacaacgccatgcaggagctgcgtgccctggccgagacggccggctcccaggtgcttgagggcctggtgcaacgtcgttcccgccccgacgccgccacctacatcggcgagggcaaggtcaccgagctgcgcgaggccgtggtggccacgggcgccgataccgtcatcgccgatggcgaattgagcccggcgcagctgaggaacctggaggaccgggtcggggtgaaggtcgtggatcgcacggccctgatcctcgacatctttgcccagcacgccaagagcaccgagggcaagacacaggtggaactggcccagctgaactacatgaagcaacgcctgcgcggctggggcgagagcttgtcgcggcaggtcggcggacgggcggcctccggtgtgggaatcggtggccgtggtcccggtgagacgaagctggagacggatcgacgtcgcatcaacacgcgcatcgccacgctccgcaagaagttgcgggccatggatgcctcgcgtgccctccagcgcgaggagcgggtacgccaccggatcccctccgtggccctggtcggatacaccaatgccggcaagagctcgctgctgaatcgcctcaccggggccggtgtgctcgtggaggatgccctgttcgccacgctggatcccacgacccggcgttgccgcaccactgatggacgcgtctacacgctgaccgacaccgtcgggttcgtccgccatctgcccaccgacctggtggcggcctttcgctccaccctcgaggagtcggtacgcgctgacctgttgctgcacgtcgtggatggttcggaccccgatcccgaaggccagatcacggccgtccacgaggtcctgcgcgacatcggcgcgggggagcgcccggagcagatcgtggtcaacaaggtcgacctggcctccagccagagcctgctcgaattgcggcacaaccaccccgacgccgtgtttgtcagcgccgtgaccggcgaggggctggaggaactgcgcacccgcaccgagtcgcgcctgccgacgccgcagaccagtgtggacgtggtggtgccctgggatcgcggcgacctggtggacaaggtgcaccgcttcggtgagatcagccaggacgaatacctcgcggagggcacgcacctggtggcgcgtgtctatcccgacctggccggtgaactcaagccctatgagcgggcgtgagcgattcccgtcgacacccctgccagacgttccgcctcgccggacctaccgggtcgccggccgtaccgggcgagttccggggccggtgttgccggcgcattagggtgtccgggtgacatcggatcggattgagcagacgtcggcagccccacagggcgccgacgacatggaggaccccgcatccgaggcagcgaacgacccgggcgacgaacacgaactgtgcaccagcgtgctggatgcgacggtggcggcaatcggggggcaggctcgtccgggacagcgtcggatggtcgaggcagtcaccggggccatggctgccgatgatgccctgctggtgcaggccggtacgggcacgggcaagtccctgggatacctggtcccggccctggtgcatgcccagcattcagcgtcgaaggtcgtggtcgccacggccaccctcgccctgcagaaccaattggccaccaaggacgggcccagtgtggccgccacattggcctcggtcaccgggcgaactcccaccattgccgtgctcaaggggcgcgccaactacgcctgcctggtgaaggcccaggaggggaccggctcggaacaggacaccctgctgtccggtgcagagctggccgaggccgcccacgcctcgggcgcggacgccgacacggccctgggcgccgaggtggttgccctgcgcgaatgggtcgccgagcaggcccgtgatcacgagctggcagatcgcgacgacgcaccggcacacaccggccgggcatgggcgcaggtgagcatttcagcgcgccaatgccccggatcgcgttgtcccctgtacaacgaatgcttcgtcgagatggcacgggccagggcgcgcgcggccgacctgatcatcaccaaccatgcactgctcgccattgacgcgatgagcgatcgcgacatcctgcccgagcatgccgccgtgatcatcgacgaggcccacgagctgaccgcgcgcgtgacgggagcggcctcacaggaattgagtccccaacagatcgagcggttgagccgcagcgcctccgactggatcgacgatgatctggccgtcgaactgctcgatgttgccgatgcactgacgggggccatcgccgaggcggaggtcgggcgcctcaccaatccccacagcacggccgtcgcggccatagcccgcgtgcgcgatgtcgcccgcaaggcggtcagtgcgctgtccccggggtcgtcaaagggcgggatcgacgccgcccgtgccgctgcccagggggacgcccgcgaggtccacgagacggcacaacgcatggcggacctctccgacgccgacgtcgtgtgggtcagtgagcgggaacgcttcgggcgccagctcaatgtcgcccccctgtcggtggccggcctgctgcgtcatcgggtgatcgccgggaaggcagcggtcctcacgtcggcgacactgacggtggggggatccttcggtccgatggccggtcaactcggcctgcgccgcgaggaggaactgaccgacgattccggcgtgcgtgagccggcggccgacccggaggccgtcgcctggcgggggatcgacgtggggacgcccttcgactatccccatcaggggatcctctacacggccgcgcggctgccgcgtccggggcgagagggcctgtctgacgaggtgctggcccagatcgccgagctggtctgggctgccgggggacggacactgggactgttctcatcccaacgcaatgccgaggcggccgtgcgccacctgcgcgccgagctacccgccctgacggtgatgtgccagggggaggcccaactgcccgagctcaccaggcggtttgccgccgatccgaagtcgagcctgttcggcaccctgtcgttgtggcagggcatcgacctgcccggcgagacctgccagctggtgatcatcgaccggatccccttcccgcgtcccgatgatccggtgatgcaggcacggcaggaggccattgccaaggccggcggcaacgggttcatgcggatcgcggcgacccatgccggactgctgttggcacagggcgcaggccggctgatccgcacctccgaggaccggggcgtcgttgccatcctcgactcgaggttggtgacggcccgctatgggagcttcctgcgggcatcgctgccggcgttctgggaaacgaagaacctcgacgtggcggtgaacgcgctgcgcagattgcgcggggagcagtagggcctacatccggcgcagcacggcgacgaccttgccgacgagcgtcgcctgatcgccgttgatgggctcataggcctggttgtggggcatcagccacacatggccatcgcggcgctggagttccttcacggtggcctcatcgtcgagcagggccgccacgaaatcaccattgtcggccgtgctctgttgccggatcacgacatagtcgccgtcgcagatcgcggcctcgatcatggagtcaccgcgaacctccagcatgaacacggtgccatcaccgaccagctcgcgtggcatcggcatcacctgctccacctgttcgctggccaggatcggggcgccggccgcgatccgcccgatcacgggcacattgatcgcctcgggaaatgcatcaccgaagccggtgatgtccatcgtctcggcgggatccgcgtccgcacggcgcgccgggggcatgaagacctccagcgcgcgagggcgcttcgggtcgcgacgcacaaagcccttgtcctcgagtacctcgagctgatgggacacgctggagggactggtcagtcccacggccttgccgatctcgcgaatgctggggggataaccgatggcctccacgctggcctgcacgaattcaaggatgcggcgctgccggggactcaggtcactgatggcaccgggtgcctcgccggagcgctgaagggtcttcactgcgtcgcgccgcggctggctggccgccagctcctggttgatgcgcgcccgactggggcggcccgcctttcgtgaacctccgtccgaaggttccggggcatcctgctcggcgctggaggaatcagtgcgggacgcgggaccagtcatggagtcaggataccgggcagggggacaatcatacggttgttcgatgatggcgtgtcgcggggtgatccgtttttgtcagtggcgggtgcttggtttggaacatgtgttcgaccggtccggaatcgcgcagggtggcacaagccttgcgatcgaacagatgtcctaatatgttgttcgaacaggtgttcgacatgcggcgggctggcattcagcgtcccggttgcgtgggtggtccggatggggcgggatggcgcaggaggtctgcggccatgtcggtcacggtggggcgcacggagcactcgatcagagagcaggtatcacgcatgagtcagatccagatcctttccccggagccggacggcatcgttggccgcgacgtgtggcccccgaccgccgccggccgccccaccctgaccctgttgccgggtggtgccggattctcgggtgatgctgggtcctcggatgatgcggggttctcgggtgatgctgggtcctcgggtgatgcggggtccggggacggcggggcggcgcgcggcaccggttcgacgggcactgtgtcccgcggcggtcgcctgggcgagccggtggtgcgctcccgtgtcgccaccggctctgcggtgccatcggcgccgcgggctggcacggtgtctgtggcgccgcgggctggcacggtgtctgtggcgccgcgggctggcacggtggccacggctgcccccggggtcggtcccagcctggttccccttgacctggcgggatcccaacgatccggcgagggtgcgccgcgcatcaccaaggggctcgtgcacgtgacccgctcggaggcgcgcgtgacgcgccctgccgcgaccagcggcgcccgtgccgccagtgcgggctccgccgtggtgtcggtgcggacggcgggtggctggcggttgacgacccggggaatggccgtggtgatctgtggtttcgtggtgacgatggctctgggcgtgggggtcatcctcgggtcattggtgggaaccgcccgtgcggacgcggccatggcgcggtcggctgctggcgctccgatggccgtccccgcgggctgataggttcggggccggctgcgggatccccggatggcgggtcgccgtccgggcgtgggttgccagctgcccctgtgcccactgccggtcagggatgcatgcggtccgggatgcatgcggtccgggatgcatgcggtcggggatgcatggcgcaatgtccgcggcgttcacggatggacactgaatgtggggtctgacgccaacaggtgtactatatgtagtggttgcaccgataggattcgtccatgggttgtggccgtgatgtatcggatgttcacctccccagccgcctgatgaggggccggccgggggaccggaccaggctcgaggagaaggcatgcattgtccttattgtcaccacagtgactcccgggtgctggattcgcgtgtcaccgaagacggtgcgagcattcgtcgccgccgccagtgcctcagctgccagcgtcgcttcaccacggtggagcagatgcagctcatggtggtgaagaagggcgatgtggtggagcccttcagtcgcgacaaggtgatcaatggggtacggaaggcctgcaagggacgccccgtcaccgacaagcagctcgcccggctcgggcagacggtggaggacaccgtgcgtgccaccggacaggcggaagtctgctccgaggacgtgggcgttgcgatcctcaagcccctcagcgaacttgatgccgtggcctatctgcgcttcgccagcgtctacaagcactatcagtgcgtggatgatttcctggcggagattgcgaggatgaaggccgagcagctcaccgattccgacgaactcgttgactcggccaccccagccaccacctcctgaccaccgggagcccggggaccactgcggttccggggccatcccgtcacgacgcatgaccaagtaattccccatcaggacaacaccgccttcggaccagtgcggcccggagcatccggtggatatgcatttacccccacagggttcccctcgcgggcggaccgtcgaagagagcaagagaggccacgatgacacagaccacgagcacggccgggcagaccgggcagaagccgggaggcctgcgcgtctcccgcgttttcagccggcccgatgtgcatccctatgacgaggtcacctgggagcgtcgagatgtggtgcagaccaactggaagaccggtgaggtcgtcttcgagcagaaggacgtcgagtttcctgatttctggagcgtcaacgcctccacgatcgtcacgacgaagtacttccgcggtgccctgggaaccgatcagcgcgagtcgagcctcaagcagctgatcgaccgcgtggtcaagaagtattcggccacgggcctggcggagggctatttcgcctccccggaggacgccgaggtgttcgagcaggagctgacctggatgctcgtgcaccagtacttcagcttcaactcgccggtgtggttcaacgtgggcaccgcgagcccgcaacaggtcagtgcctgcttcatcctgtcggttgatgactccatggagtcgatcctcaactggtacaaggaggagggcatgatcttcaaggggggatcgggcgccggcctcaacctctcccggatccgttcctccaaggagttgctgcgctccagcggcggcaccgcgtccggaccggtcagcttcatgcggggcgccgacgcctccgccgggacgatcaagtccggtggggccacccgtcgtgccgccaagatggtcgtcctcgacgtggatcaccccgacatcgaggaattcgtggagacgaaggcgcgcgaggaggacaagatccgcgccctgcgcgatgccggcttcgacatggacctgggcggacgcgacatcacctcggtgcagtaccagaacgccaacaactcggtgcgtgtctccgacgagttcatgcaggcggtgcaggacggcaccccgttcggcctcaaggcccgcaccaccggtgaggtgatcgaggaggtcgacgcgaaggacctgtgggggaagatcgccaaggccgcctgggagtgcgccgatcccggcatgcagtatgacggcacgatcaactcgtggcacactacgccggagtcgggacgcatcaatgcctcgaacccctgcagtgagtacatgagcctggacaacagctcctgcaacctggccagcctcaacctgctgaagttcctgcgtgacgatgacagcttcgacaccgagttgttcaccaaggcggtcgaactcatcatcacggccatggacatctcgatctgcttcgcggatttcccgaccgaggccatcggggacaccacgcgtgactaccgccagctcggcatcggctatgcgaacctcggtgcgctgctgatggcgctcgggaagggctatgactccgagggcggtcgtgccctggcggcggccatcacctcgttgatgaccggtaccgcctaccgtcgcagcgcagaaatggccggcgtcgtggggccctacaagggctacgcgcgcaacgccgagagccaccagcgggtcatccgcaagcacggcgcagccaacgaggcgctcgacaatgtggccgcgatcgacaccgaggtgcgccgggctgcccagcatgagtgggacaaggccgacgtcatggggcaggccaatggcttccgcaatgcgcaggcctcggtgctggcccccaccggcaccatcggtttcatgatggattgcgacaccacgggtatcgagccggacttctcgctggtcaagttcaagaagctcgtcggtggtgggtccatgcagatggtgaaccacaccgtggagcgggccctgacgaatctgggctatgacgccaccacccgtcagtcgatcgtcgactacgtggctgagaagggcaatgtcgtgggtgcccccggcctgcgggaggccgactacgaggtcttcgacaccgccatgggcgtgcgggccattgccccgatgggccatgtgcgcatgatggctgcggtgcagcccttcctgtcgggcgccatctccaagaccgtgaaccttccggagagcgccaccgtcgaggaaatcgccgacgtctacatgcagggttggaagctcggcctcaaggccctggccgtctaccgcgacaactgcaaggtcggccagcccctgagcagtggcaatcagggcaaggacgacaacaagtcgacgaccgatcaggccaagcccgaggtgcgcgtcgaatatcgcccgcgtcgtcgccgcctgcccaagagccgcgccggtcgcacgacgagcttctccgtggccggtgccgagggctatatgaccaccggcgcctactccgagggccaactcggtgagatcttcctcaagctcggcaagcagggctccacgttgtcgggtgtgatggatgccttctcgatcgccgtgtccatcggcctgcaatacggtgtgccgttggagagcttcgtgcagaagttcaccaacctgaagttcgagcctgccggcatgaccgacgaccccgacatccgcatcgcccagtcgatcctcgactatgtcttccgccgcctggcgctggactacctcgacttcgacgagcgcggcgagctgggcatctacaccgccgacgagcgtgcccactacgtggagacgggttcctatctgtcggaggaggacgaggcatcattgcccgagagcgaacagctgaagaacgacgccggggatgacctgaaggtcgaccaggccggcgcgcaccagccgagcctgatcgatgcggcagatgtgcgcccggtggaggtcgaatcctctgacggccatgcaccgcacaccaccaccgagatgatggaggacatcatcgggcaggccttcgatgcaccgctgtgcatgacctgcggttccaagatgcgtccgagcggatcctgctacgtctgcgagagctgcggctcgaccagcggctgcagctgatccgccggcagcgccggttgccgaccgggtagcccagtgcacgacatggcagggccccgaccacttcacgtggtcggggccctgccatgtccctgcgggggtcggtgctcagcggtccgcctcggccagtggcgcaggctccacgccgaggaattctgcgatgtccggcagctcgtgggccgcctggcgcaatccggcgcggtaggactccctgaggcggccgacgtcacgctccacattgctcaccggcatcgtctgcggcacgaacaggtacgcatggccatctgcttgcaggtcaaacagttcctcgcgtgtggcgttgtaccccggatgccggtggaccagcgcatcgatgacggcaggatgacggtggaacatggcccggtagatcgccagctgggcccggtccgggggagtcttgacgtagtcgcgttcccgggtcagcaccaccaggaatttgtcgaagccggcgtcctgcgcccggtccagcgcgatcccaccgttcggccccaacgccccgtccacatagtcggtacccccgatcgtcaccggcggcatgaggcccggcatcgtcgaggaggcccggacccgacgcatcagatcgggcatggtgggcatgtccgccttggtgaaccagacctgctcgccggtgtccatccgtacggcagcgacattggcccgggccggattgtccacgaaggtggcccagtcgaagggaagcgcctgaccggggccgccggtctgctcatagatgtacttcgcatcgaaccagccgcggccatgcaccagactgcccaggcccccgaaccgccgatctcccacgaaatcgacgaaggagcgccgcgcgcgcaggggatcgcgcgagatgtagttcgccgtattcgacgcgcccgccgagatccccgccacccagtcgatgtggatgcctgcctccagcagtgcgacggccacggctgcggtgtaactggcgcgcatgccacccccttcgaagatcagggcggtatgcaggacattgctgtggaggtggggcatgcaccaagtctcgcccacgggccctccccgggtgcaaacgcgctcggatggtgttcggtgggaccatcgcattcgactgcgggtattggtccagccaatccaccacatagtgcacatccggtcagctgcatggccctgtgcgtgcgatccccatagtgtggcaacacgggccattgcgtcggtgcgatggcccatgcagggaggttgtcatggcggacatgtctgtggacgtcgtcgtaatcggcggcggtgccacggggactggggtggcacgcgatgtcgcgatgcgagggttcagcgtggtgcttgtcgaccgcgccgacctggcgcagggcacgacggggcgttaccacggcctacttcactcgggcgggcgatatgtgatctccgatcccgaatcagcgcgcgagtgcgctgaggagaatgcgatcatcacgcggatccacgccaatgcggtggagcagaccggcggcctgttcgtggtgacccccgaggactccgaggaatactccgatgggttcatggcgggggccgagaaggccgacatgcccgccgaggagatcagcgtggcccaggcactggcgcgtgagccccgcctgaacaaggggatcaagcgggccttcgccgtgtgcgacggcaccgtcgacggttgggccatggtgtggggcgccgcagagtccgccaaggaacacggcgccacgatcctcacctaccaccaggtggacaagatccatcgcgtcggtgaccagatcaccggtgtggaatgcgtcgaccgcaaggcgggcgggcgcttgtcgatcgactgccgcttcgtgatcaacgccgggggcccttgggcgggtcacatcgccgagatggccggctgccacgacgtggaggtcgtgcccggtcgcggcatcatgatcgccatgaaccatcgcctggtgaacacggtggtcaaccgctgcatcaagcccgccgatggcgacatcatcgttccggtgcacaccgtggccatcgtcgggaccaccgacgtgaaggccgacgatcccgatcgacttcccatcccgcgcaacgaggtccagcagatgttggactccggcgaggcgctggtccccggattccgccaggcccgggcggtgcatgcctgggccggcgcacgcccgctggtcaaggacaaccgggtttccgccggcgacacccgccacatgagccgcggcatggccgtgttggaccatcaggaacgcgatggggtcaatggcctgctcaccatcagcggcggcaagctcacgacctaccgcctgatggccaagcgcatcgtcgacatcatgtgcgagcagctcggggaggaccgccgctgcaccaccgaccaggaggtcgtgccgacggcccgccaccagcacacctaccgggtgacccaccgactggaggagcgtgaccacggcttccagaaggaccagatcatctgcgagtgcgagctgatgagccgcgagatgttcgtggacctggcagaagagaacccgcacgccacgctggacgacctgcgtcgccggctgcggttgggcatgggtccctgtcagggcggcttctgttcctcgcgggccgccggactgttgtgctcctccggcatccaggattccgccgaggccaccgaggaactgcgcgaattcctcaagcaccgctggatcggcctgtggcccatcgtggccggcgcccaggtgcgccagacagcgctcgatgagtggattgcccgcggcaccctcgacatcgaccacgccccgggtacgcagaatccgccggaacgctatccggtgggcgcaggggccaacggcactgagaacgcggaggttgcacgatgagggacgtcgtagtcatcggggcaggcctgtcgggcctgctggccgcgatccggctgcgccgggccggcctggccgtcaccatggttcacaagggcaggggcggcctccaactgggccagggcaccatcgacctgttgggataccgacccgaccgggtcgcccgtccgctcgacgagttggacgacttcctggccgtccagcatcgcgacaatgacatcacccatccctacgcgcacatcggcgtcgatgccatccgcgagggtgcggagtacctggccgaactactcggcgagggattcctgatgggcgatcctgcggtcaacgtggcactgccgacggccatcggggccctgcgtcccacggcgctgtaccagccgtcgatggcagagggcgtcatcagcctcgatcccgccacgcccggtgcgctgcatgatggttcgaagctggtcgtggtcggcatccgggagttcaaggacttcacccccgaactgatcgccggcaacctggaacgcaccgagctccccgcagggggccatctgcaggcccgcgcagcgtgggtgagcttcccggcccgcaagggcgaggtcgactcgaccgggctcaacatcgcccgcgcgctggacgaccccaaccgtcgcggtgcactggtgcgccagctcaagaagctcgtggagcacggcgagaccatcgccctgcccgccgtgctcggcgacgaggacccgggcgcgttcgccgacatccgccgacaggtgggcagccccctcttcgagatcccggtgcccccgcccagcgtgccggggatgcgcctcaatgatgaactgatccgccatgcgaagcgtgagcgggtggagatcatcctgggcagcaaggtcacgggggccgacgccaccgacggccaccttgatgcggccgtggtgggtacctcgggccatgacacgcacctgaaggccaggaccttcctcctggcggccggcggcttcgagtcggggaccctggaactggattcctaccagaagctgtcggaaacgatcctcggacttccgctggcggtgccggccggagaactgatcaatgacacctgggccggccagcagccgctgttccgtgcaggtgtcgccaccaacgacgacatggtcgtggtcgatccggcaacgggtcagcccgtccatgacaatctctgggccgctggcggcgtgctggccggtgcccaacggtgggacgagaagaccggtgacggcattgccgtggccagcgcagtacgcgccgctgatgcgatcatcagcaatcttgcgggaggacagcgatgaccgagctgaagaacaccgaagcatccgtcgaggccgacgaggagtcgcgcgtgcaggaccgacccgggagcctcggcccgggggccacggtctgggagcacctggcccaggtcagtccccggatcaagaacaatccgaacacctatgaggcgcagcagctcaatcgggcctcgctggaccagtgcgtcaagtgcacgatctgtgagacgcagtgtccggtggccaaggccaccccgctgttcagcggacccaagttcgtcggcccgcaggcggagcggttccgcaatggcgagtcggtggatcacacgctcgactactgctccagctgcggcatctgcacgctgacctgcccccagggcgtgcgcatcgccgaactcaactcgatggcgcgcgccgtgatgaagcagggccacatgcccctgcgcgaccgcatcatcacccagaccgagctcgagggcaagctgctcaccccgttcgcccccgtggccaactgggcactcaagcagaagccgatccgggtggccgtcgagaaggtcgtcggcgtgcaccgcaatgcccccatgcccgtggcccagagccagagcgtccagggctggctgaagaagcgcaagggacccgcggcccgccggcccggacagcccgaccgcggtccggtggtcttcttcaccggatgcgccggcagctacttcgaggtggagacctccaagaagacgatcgaggtgctcgagcacctgggcttcgaggtcctggtacccaagcagggctgctgcggattggccgaacagtcgaacggcctgttcaacggcgcccgcgcccatgtgcgcaagctgtgcgcccagctcaacgccgccggcaaggacctcacgatcatctccagctcgggttcctgcgcgggaatgatcaagcacgaggcccacgagatcatgggcgtcgatgaccccgaggtgatgagcgtcggcacgaggatgcgtgagacgagcgagttcctgctggagatgtacgacgagggtcagctgcccaccgatttcgtgcggatcgacatgaagcttccctaccatgcgccgtgccaggtgaagagccagggcatgggcatgccggcgatccggctgatggagctggtgcccggcatcgaggtcgtcgagtccggggagaactgctgcggcatcgccggcacctacggcttgaagaaggagaagtacgacgtggcccaggaagtgggcaagaacctcttccggaaggtgaaggagaccaacgacaagttggcggtctgcgacaccgagacctgccgctggcagatccgcaactcaaccggcgtgcccaccgtgcatcccatccacgtgatccacgccgcctatggactgtcgagcatccacagcccccaggtctgagttcaacctgttggacatgggaagggtccggcccccgcaaggggagccggacccttcccatctgtccgatgcggcagaccggttactgcgacaggtccagggcgacccgggccgtcttctcgtccaccaccaggtcggtcatcacctgggcgcgcagcgcggccaccagggcacgggccttgccgaccccggcaaccacgcccaggcggcgggggatccttcgtagctgtaggggagtgggacccgaggcccgcgtgttcaacgcgatatcggcccagctcccgtcctggcgcagcaggaccgtgcagacatctcccacgacgtgatcgcggctgagttccgcgcgggcctcatcatccaggtacccggaggaatacacatggctgggcagtccgccggccaccgatccgacaccgaagaccgccaggccgcactgcaattgcatctcgcgcacccgggcgatcgagcgttcgcgccacagggcctcgcgcgtctccgcataatcgaagaaggccggcaccgggaacaacagcgattcggcgtcataggcctgggcgaaacgggacatgatgttcgacacatagtcgatgccggtggtgcggtcattggcggctccgttgagctgcaccagggtgacgccgttgaccggcttcgactgcaggtgggcggtcaccgcggcaatcgtggtgccccaggcgataccgagcatggtgccgtcctggacggcctcgcccaggacgctcgccgcgaccctggccacccggtcgaggcgaccgacatccgacaccgcatccttcatcgtcaccacgtgggcattgacgccgaaacgacgttgcagcatgtcctccagtgccgaatgcgcgccacgtggatgggtcagggtgatgcgaaccacaccggtatcgcgggccagctttatgtgccgggaaaccgtggagcgtgagacaccgagctggtgggcgatcgcatccatggactcgccctgcacgtaatacaacaatgccgtgcgatacagatcgtcctcgcgttcagctatcgtccccactttcattcgtcgtgacccggtgagccattctcggtgacccggtgagtcattctcggtgacccggtgagtcattctcgcaagtctagccccgacgccccacgggccgaccggcgggcggagcaccgcgccgcgggccccacggcccgctttcaccggccgggtgcaccgggcgacaccccgacattgcggtcggcgccccgcgtacgctcttgcccgtgatcgatgtgctgagcggtttcgccaccatctgggtggtgatcggtatcggcgcattcctgggacacctcggaatcctgggcgaccaggcagccacgatcctgagccggctgtccttcttcgtcggcctgcccccgctcatgttccgggccctgtcacatgccgacctgggccgtatcttcaacctgaacgtggtggtgtcggtgttggcgatcatcgtcgccgccggcctctacctgttggtcggcgttctgcgctggcacgccggcctgtcgcatcgggtgatcggcgtcttctgctcctgctacgtcaatgccaataacatgggcctgccgatcgccgcctatgtgatgaaggacaccagctgggttgcccccatcctgctgatccagtccgcgctgctgcagcccatcggcctgaccctgttggacgtggtgcactcccattcccggggcgtgcacagttcctggctccacaatgtgacgatcccggtccgcaaccccatgaccatcggggtgctggcggggctggtggcgaacctcatcgggtggcaaccgcctgccctggtgggaaacaccctcgacctgctggcgggtatcgccgtcccctgcatgttgatcgccttcgggatctccctgctgaaggggcccctgccggggcgcgtcgacaccgcggaaacggtgttcctgtcggtgatcaagaccctggtccaacccgtggtcgccctggccctcgcacgcctgttcggcctcgacttggtggcgaccctggcggtggtggtgatggcgggattgcccaccgcccagaatgtcttcgtctttgcgtcccgctatgacaccaatgtgcgtctggcacgcgatgtgatcttcatcaccactttcgcctcgataccggtgatcacggcgctcaccgcggctgtgcacatgctggcctgagcccatcaattcccaccccgccgtcgtgaaatgggcccggtggcggttagcgtggtgacatgagttctgttccgagcctgagtatcgacgagatgcaccaggtggatgcctggtggcgcgcgtgcaactatctggtcgccggccagatctacttgcaggaaaacccgctgctgaagcgtccactgacccccgaggacatcaagccacggctgctgggccactggggcaccagcgctggcctgggcttcatctatgcccacctcaaccgactgatccgccacacgggtcaggacatgatctacatcgccggccccgggcacggcggaccggcactcgttgcggccggctacctggagggcacttacaccgagatctatccgcgggtcacccgcgacgaggagggcatgcggcggctgttccggcagttctccacgccgggcgggatcccctcccacgcctcggtcaccaccccggggtcgatccacgagggcggcgaactcggctacgccctgtcacacggcttcggtgccgtcttcgacaaccccgacctcatcgcggccaccgtcgtgggcgacggggaggccgagacgggcccggcggagggcggctggaagggcatcagcttcctcaacccggtcaccgacggggccgtgctgccgatcctccacctcaatggcgccaagatctccggacccaccgtgcaggcccgcaaggagccggtggagctgcaggagctctacgagggccacggctacgaggtggtgtgggtcgagggcagcgacctgccctggatgcacgcccgctttgccgacgccctgacctattgctacgaccggatcaaggagatccaggccgaggcacgcggcgggagctgggacggcgaaatgccggcatggccgatgatcatcctgcgcagccccaagggctggaccggaccccggatcgtcgacggcaaccaggtggagggcacctggcgtgcccaccaggtaccgctggcgggcgtcaagaccaacgcggcccatcgtgagcagctcgaggactggatgcggtcctaccgcatcgacgagttgttcggtcccgatggcaccccgaccgagctcgtgcgcgccaacaaccccgagggcaccaagcgcatgagcgcctccccctatgcgaacgggggagtgctctcccaggagctcgacctgcccgatttccacgactacgccgtggacgtcacgccgggaacacgcgccaccgagcggctcgaatcgacccgcaagctcggcgagtacatgcgcgacatctacacgaggaatccgacgaacttccggctcttctgccccgacgagacaaactccaaccgactcggcgcggtcttcgaggtcagcgaccgcaccttcatggagcccaccgacatgctcgacgtcaagctgtcgaacaccggacgcgtcatggaggtgctctcagagcacaactgccatggctggctcgacgggtacaccctcaccggacgccacggcatgttcgccacctacgaggccttcgcgatggtctcggcgtccatgacgatgcagcaggccaagtggctggagggggcctacaacctggagtggcgggccaaggtgcccagcaccaacatcctgctgagctcgacctgctggcgcaatgaccacaatgggttcagccaccagagtcccgagttgctgtcgctggtgttgaacatgcgcggcacggtcagccgcatctacctgccaccggacgcgaactgcctgctcgacattgccgaccactgcttcaagtcgcgcagctatgtgaacctgatcgtgcaggacaagcagccccaaccccagtggctgtcaatgcccgaggccgtcgagcactgcacccgtggctacggcatctgggattgggcgggcaccgacgggctgggcgacaccaagcccgacatcgtgatcgcctgtgccggcgacgtggtgaccatggaggccatcgcggccgctgagatcctcaaggtggccctgcccgaactcaaggtgcgggtggtgaacgtggtggacctcatgagcctctaccggcccaaggaccatccgcacggcatgagcgtgaaggacttctccgacaccttcaccgacgacgtggacgtgatcttcgccttccacggctatcccggagcgatccaccagctcgtgcacggacgccccgatgccgaccgcttccgggcacgcggcttccgcgagcagggcaccaccacgacccccttcgacatggtggtgcgcaacaaggtggaccgctatcacctggtgatggatgcgatcaacaacgcccattaccgtcccgagggcagccacgagctgtaccagtggtgcgaatcccagctggtgcgccacagcgagtacatcgtggagaacctgcaggacatgccggagatccgtgactggcaactgggtgatgacgcctccggcgcggtcacccagttcggtggcaagcaggtcgcgccacgtcccggtgccgggacggtggcccggcgcgccgggggcaagggcaccgtggccaaggcacaggccgccgacacgcccgcagcccgcggtgccgatgtcggggacaccggtaagcaggcccagcccggagcggacgccccgtcgaagaaggacgcggatgtgaagaagggcactgatttgaagaaggacacagggccgaagaagaagtagcccgacggtggggcggccagcctcccggccgggggcatccaccccgaccatggccgccccacccgttcgcggcccgcgggcgcctcggccgcggggcgcccggacgctgtgggacgggtggctaggcttgtggggttatgtcccagccctccagcactgccgttgagccacagctgtcctacgatcccgccctgcccatcagtgcccacgtcgaccagatcgccgggctgatccgcgatcaccaggtggtgatcgtggcgggggagacgggctcgggcaagaccacccagctcccgaagatctgcctcgggatcggtcgtcgccacatcgggcacacgcagccgaggaggatcgccgcacgtacggtcgcggagcggctggccgaggagatgcacgttcccctgggcgacaccgtgggctatcaggtgcgcttcaccaagcaggtggggcgcaatacggccgtgaaggtgatgaccgatggcgtgctgttggccgagatcaaccacgaccgcaccctgcggcgctatgacaccctcatcatcgatgaggcccatgaacgcagcctgaacattgacttcctgctgggctatctcaagcagctgttgccgcgacgtcgtgacctgaaggtgatcatcacctcggccaccatcgacacccaacgatttgccgagcacttctcggatgcgcacggaaggcctgccccgatcgtggaggtctcgggccgcagctatccggtggagatgcgctaccggccgctgggtcccgagggcaccgacgagggcgacgaggacatctcgggtggcatcgtgcaggctgtgcgggagcttggccccaccggcgatgtgctggtcttcctgtcgggtgagcgcgagatcaaggatgccgacaaggccctgcgcgacgcccgcctggccaacactgaggtaatgcccctgttcgcccggctctcggccgccgaacagcaccgcgtcttccaggcccacaccggccggcgtgtcatccttgccacgaacatcgccgagacctccctgacggtgcccgggatcatgttcgtggtggataccggcctggcccgcatctcgcgctattcggcgcgcacgaaagtgcagcggcttcccatcgaggagatcagccgggccagtgccgaccagcgcgcgggtcggtgcggccgtatcgccccgggcatctgcatccggctgtactcggaggaggactacctcgcccgtcccgaattcaccgaaccggagatcctgcgaaccaaccttgcctcggtcatcctcaagatggcccaggccgacctcggcaacatcgagaccttccccttcctggaggcacctgaccgcgcacagatccgcgacggcctgcgcctgctcgaggaactcggggccctggcggcgcccggggcgggcggcgaggcgacggggggacgcgggcaggcggcgccgtccggcaagagggccaggggacacaagcagctgcgactgacccgcacgggccatcgactggccgagctgccgatcgacccccgactggggcgcatgctcatcgagggtgccaagcgtggctgcctgcgcgaggtggaggtcatcgtgtcggcgctggcgatccaggacgtgcgcgagcgtcccgtggagaagcgcgaacaggccgatcaactccaccgtcgcttcttctccgacgacatcctcaagcccggcggccatgcgcagccggcgggcgagtcggggagccccaggcgttacacggcgcacaccggacgggccggggagttcgacaaggcacccatcggccctggcggcgacatcatcgccatcacgaggctgtggcgctacctgaagatgcagcgcaaggaactgtccggaaaccaattccgacgccgatgccgcgcagaattcatcaacttcctcagggtccgcgaatggcaggacctgcgcacccaactgcgccagatcgacaaggaactcaagctcaaccgcaatgagcgggccggtgacgtggaccaggtgctcatctcggtgctgtcgggcctgctgtcccatattggcctgctcgagcagaagaccacccgcaaggacacccgccgtcgtggcaccaagcagcggcgcgcctcgaacgaatacctgggggcacgcggctcgcgcttcgcgatccagcccggatcggccctgtcgaagcagccaccagagctgttgatggccgtcgagctcgtggagaccagccggctgtgggcccgcacggtggccgaggtgcaggccgaatggatcgaacaggtgggcgcccaccagctgcgccacaactattccgagccccactggtcgtccagcgcggcaggagtcctggcctacgagcgggtgaccctgtacggggtgccgatcatcgccgaccgcctggccgactatgcccgggtcgacccgcaggtggcccgcgacatcttcatccgctcgggactcgtcgaggatggctgggtccccgacgacacccatgccccgcatgatttcctggagcacaaccggcaggtgcgcgcccaggtggaggaactcgaggaacgcacccggcgccacgatctgctcgtggacgaccagacgatcttcgacttctatgacgagcgcatcccggccgatgtgcactcggcagcaagctttgacgcgtggtggtcacggcaggccgaccaccacctgctcgacctcgacgtcgaggcgatgatgcgccccgacgcggacggcgtggacgggtcctcgttccccgaccactggcaggtcggcgagctgaagttcccggtgagctatgtcttcgaccccggctccggatccgatggcgtcacggtgaccatcccgctggcacagctcaaccaggtgagcgcccagccgttcagctggcaggttccgggccttcgtggtgagctggccaccgagctgatccgctccctgcccaagtcggtgcgcacgaatttcgtgccggcgccggatcgtgcccgcgaggccctgcgttggttgcgcgcccacgagccggatcgcaatgcctggttccatgacgagctcggccgtgccctgcgggcgatcacgtcggtgccggtggcatcgacggactggaatccgcgggccgtgtcgggacacctgcaggtgagcttccaggtcaccgacgctggtcgcgtcgtgcgcaccggcaaggacctcacggcgatccgtgacgagctggccgccacggtgaccaggacactcacggccgccaccaacagggcgagcaccccgactggcaccacctgggtgttcggcgccatcgatcccgtgcggcagatcacgcgccaggggctcaccgtgaagggctatccggcgctgcgcgacgacggcaactcggtctcgctggtcaccacgcagacgcccgctgaccaggcgcgcagccaccgggccggggtgcggcgcctcctgctgctcgccggacctgatcccaccaagtgggtggtcgcccggatcggccgcgaccagatgctgtggttgagctccagcccctatgaatcgatgtcggtgctgcttgccgacgcccgcctcaaggcggtcggacagtcggctgagcgcttcaccgacccggccggggtgcgcgacgaggccgatttcgacaagctgctggtcgaggtgcggcaggtacaggccgatcagatgcgctccgtggtggacaccactgcccgggccctgtcctgggcgcggcaggtgcgggccgacctggcgaatgcgccgcgtcccaccgccgacgacgtgggcgcccaggtggacaacctggtgtttcccggcttcatgtccttcacgcgcgacccgtggttcgcccacctgccccgctacctacagggggcctccctgcgcctggatgcggccgccgcgaatccggcacgcgatgcgcagtcgcaggagatcatcgatgagctgttggccgaatacgacgagttgtgcgatgcgcagccctcggggccccttcccgatgcggtggacgacatcggcttcgcgatcgaggagcttcgggtgcaattgttcgcccagcgactgggcaccagccagccggtgtcacccaagcgcatccgcaagatgatcgcccgggtgcgaggggccgacgcctgatcggtggcaccgggcccctcgccgcccggtcgcatcggcggggcgacatcacgaccatcccgggtggttggcgtgccagcgccgacaggtcgtggcagagtgaacccatgccagcaactacggacgaactcgttgatctcctgcgcctggaaccggcgcccgacaacgtcttcgtcggtcgccatccgcgcacgatgatgcaacgaacctatggcggacaggtgctggcgcaggccctcatcgccgcctacggcaccgtcccgacggggcgcgtcgcccattccctggatgcctatttcattcggccgggcatggccagcgcggacatcgaatacgccgtcgagcccttgcgcgacggccgcagcttctcgtcgcggcgggtcaccgccctgcaggatggtcgcgccatcttcaccatgtcgagttccttccacgagctggaaccgggcttcgaccattccgatcccgaaccgctcgacgtgcccccgccccaggaatgtccctccttcatcgagacgatcgaggaacgttacggcgatgcggcgatctggcacgaatgggacgccctcgacgtgcgctatgtgggggacagcaccccgggtggtggcatgccggacgatcccacgcgccgggcgcgcatgcgggtgtgggtcaagaccacggcggccctgcccgatgagatctccatccaccaggcgatccttgcctatctgtcagacctgacgttgctgtcggtggcgacgctgccacacggcgtggcgttcatgtcgaaccagctgcagatcgccagcatcgaccacgtcatgtggttccaccgcgcatccagggccgacgagtggctgctctacgacatggagtcgccctccgccagccattcactgggcctgtccatgggccggttgttccagaacggccagatcaccgccaactgcgcccaggagggcctgattcgcgtcgtggcggaccggccgccactcagctgagcggcggtgtctcctcaactgacctgatagccctgctgctttgcgtaggcgatcaactcgtcctgccacgagcgcacgccgttgaccagggttgtctcgcgacggaaggcggcgccggcggtgctgccgaaggcgctgcgcgcatggatctcatagggcaggaactgatggttgggcagcacattccttgcggcctgtgacaacacctggttgaacttctgaccaccgaagtactcgctgacgccgccgtccggtgtggtcagggtcgtctggtccaggaactcggcgctgcccagggtgtcgttgtcggccggaaaggccccgtccagcacgcgtcccctgatcccctcggaatcatgggtggcgtagtccatgaacttgtcggccgcggcggccttctcgtcggaggtggtgcgcatgatggacagggtcgagccgccattctcggagttctgcgtaccgccgggctcccaggtgggggtctgcgccacccggaacctgcccgcgccctgcggcacatcggagagcaggctgtgcggcagccagccgcccgccagcaccgaggcgatcgtgccgtcggacaatccccggtcccagtcgttcgaccattccacggtcctggtgtcgatgaggtcctcgtcgatcatgcgttgccagtaggcggtccaccgttgggttccggcatcgtcagtgaggttgatggcgaccttcttgcgatgcgtcgagaagggctgcccaccggcctgccacaccatggaatcgaagaacccggggtcgcctgcatcggaggtgatgtacttgccgatcgcgcggatcttccgggcggcctggtagtactcctcccaggtggcaggggcccggtcgacgccggcggcgtcgaagacctccttgttgtagaacaacgccatcgggccggagtccaggggcagggcatagaccttgttgtccaggttgaccgaattccaggtgccgggcgtgtagaagtccttgtagcccttcgccccgtagtccgacaggtccttcacggcgtccctgctcgcgaattcagggagggcgtagtactcgatctgggcggcatcgggcacacccttccccgtctgcagggcccggttgagggcctggtactggtccgtcgtcgtgtcggcattggtcaccgtgaccgacacattgggattggccttgttgaaccgctgcgccgcgcgctcgatggtggagtcccaggcccacacggtgacccgcaccttcttgttcgggtccaggctgggcgccgagcgtgccgcacctgcgcaggacgtcacggtcaacgccaacaccgaagccagcaacactgccgccaccctgcgggcgagcctcatcgatccactcctgttgtcctgtgcgccgtcgcgacgcgttgagccgtccgccacgtggggcagggccatcatctgctggcccgcgcccagcggcgcacttccggcgggcccccacggcggttcacgatgacggtccccagtgatcctgtcacgatcatgtgtgggacgcatatggccgatcgggggcacccgtgcagtgggcccgcccagcgggtcgccggtggccggcggggcaccgggcgatgcacaatggcggggggtgatgccggatggatgaccagcgcaggaatgtgtcgatgcaggacatcgcgagggaagcgggagtgtcatcgcagaccgtctcgcgggtgtccaacgggagcgattccgtacgtcccgcgacccgcgacatggtgctggccgtcatggatcggctgggatatcggccgaacttcgcggcgagggcgctcaagcgggggcgcttcaaggccatcggggtggcgatgttcgacatcgtcgccaccgggaacctgttgacgctggagggcatcaccaaggccgccagcgacctggactatgcggtcacgatcaccatgatgggcaagggccagcaacgctccctggccgccgtggtggaacggatgaagaacctccccgtcgacggggtgatcgtgatcctcgaacagatgctgcccgatgtgggcaccttcgttcccccggcgggaatggaggtgctgctggtcaccagtgcgcagtcgacgacgatgagcaccatcgacgaggaccagtacgggtgctcgaccatggtgaccaactacttccttgaccggggacaccggaccgtccacttcgtgtcgggccccgaggagtccctggacagccatttccgtgagcagggctggatcgacgcgttggcgcgccgcggcgtggtcgccccgccggtgatccggggtgattggtcggcggacagtggattcaacgccggactggagctggcgcacgtcaaggattgcaccgcgatctacgccgcgaatgacaatgaggcctatggggtgatgcaggggctggccgcggcggggaagagggttcccgacgatgtcagcgtcatcggggtcgacgatgttctgcgcaacctcatccctcggctcaccctgaccagcgtgaagatgaacttcggggcggtggggcgccgggcgttccggatggtggcccgggccatcgaggatccccaacgctcccggcccacccgggagctcattcccggcgtactggttgagtgttcctcggtgcgtgacctgacgcgctgacatgtcgccggacgcgatatggccggccacccgtgggggtgaccggccatatcttcagcaacgatcggatggcgtggcggccggggaggccgtcgcggcaactcaggcggctgcagcggaggtgcgcagctggttgagcgctgcgcgctcgatctggcgcacgcgctcagcggtgatgccccacaccttgccgatgtcggacagcttggcctgatgtccgtcgagcagcccgtagcggcgacgcatgacgtcggcggagcggtcatcgaggttggccaacagcgcctcgaggcggctgcggtcctccaggtcgagcaccagctcgtcgggtcccggcgcggtttcgcgggcgatcagatcgcccagcgaggtgtcgccgtcgtcctcgaccggggcgtcgaggctgacatgctcacgcgagtacctgatgaggtcgatgaccttgttctcctcgaggccgagctcgttggcgatctcggagacctcgggctcgcgaccgagctggcgctccaggttgcggcgtaccgcggagatctggttcacctgttcggccacgtgcaccggcaggcgcacgatgcgtccctgctgggcgatgccgcggctgatcgcctggcgtacccaccacgtggcgtaggtggagaacttgaagcccttcgcgtagtcgaacttctcgaccgcgcggatcaggcccgtgttcccctcctgcacgaggtcgagcaggggcatctggctgcgtccgtacttgcgggccaccgacacgacgaggcgcaggttggcgcgcacgaagtgctgcatggcgcgctcaccctcctcggcgatgccgagcagttcttcctcagtggccttggtctttgtcttgacctcaccacgaaggacggcctgggcatattgaccaacctcgatgaggcgggcaagctccacctcttcagcggctgtgagcaggggggtcttggcaatcgactcgaggtagaggccaaccgagtccttgccgtcgataccgtcgttgctgcgcacgcgagtctttgaatccatggggttcccttccgtgtcctcgtaagtgtgtaacgctcaactgtgcggaatccatgccaaagctggcagatccattgaaaagagctcgggttgcgggtatacgtacgaccacggtcgcacccgcaaggtgatcgtcaacgtccccgggtgcaggcgcggtctcgtcgtgcttcgggcctcgtgggggtgggatgtcccgccaacagggcgcggctcccggacgctgacggcgtctcggacttgggtcggcgcctatcgcgtgacagactaggggacggtgcgcccttgacagtagcaggctttcgcgcaccctgaatcgcggttcagccatcatcttgggtagtttgaaaggtcgcttgtgacggctcgcacgaaggaaaagacctccaccactgccgaatcggcaactcgggaagacagtgggaagatcaccaaaccgagggcaaagaagacccttgcggccgccagcgcggtgaagaccggcacggtcaaggcagacgcgaagtcggccaaggccacctccgcggccaaggaacccgccacgaagtccgcgggaacgaagaccaggtcgagcgcggccaggaaggccgccccgaccaagtcgaaggcggctgccaagggcgagtcgacggccaagaaggccgcgccgaagaaggccgctgcgaagacccgcacccacaaggccacgaaggccaccaccagcaaggccgcactgaccgaggccatggccggcaagaagtcgggcaaggcccaggccgagggcatcgaggtcaccttcgaacgcgatggtgacgacatcgtggtgcgcgccgggggcaagaagcgcaccctggacgacgtcgatgactccaagttcgagaaggacaagaaggaagccgagaaggacgaggcgaagatcaacgccgactcccagggcttcagtctgtcggacaatgatgaggacgacgagcccgagcagcaggtcatggtcgccggcgccacggccgatccggtgaaggactacctcaagcagatcggcaaggtggcattgctcaatgccgcccaggaggtcgacctcgccaagcgcatcgaagcggggttgttcgctggcgagcagctcaccaagaatggcgacaagatcgcgcgggcggaccgcggtgactatgagtggatcaccgaggacggccatcgggccaagaaccacctgctcgaagccaacctccgcctggtggtgagcctggccaagcgctacaccggccgcggcatgttgttcctcgacctcatccaggaggggaacctcggcctgattcgcgccgtcgagaagttcgactacacgaagggctacaagttctcgacctatgcgacgtggtggatcaagcaggccatcacgcgcgccatggccgatcaggcccgcaccatccgcatcccggtgcacatggtggaggtcatcaacaagctcgcccgcgtgcagcgccagatgctgcaggaccttggccgcgaacccacgccggaggagctggccaaggaactggacatgactcccgagaaggtcgtggaggtgcagaagtacgggcgcgagccgatcagcctgcacacccccctcggggaggatggtgactccgagttcggtgacctgatcgaggactccgaagccgtcgttcctgccgatgcggtgaacttcacactgctccaggagcagctgcacgatgtgctcgacacgctcagtgagcgcgaggcgggcgtggtgtccatgcgcttcggcctgaccgatggccagcccaagaccctggacgagatcggcaaggtctatggggtgacccgtgagcgcatccgccagatcgaatcgaagacgatgagcaagctgcgccatccgagccggtcacaggtgctgcgcgactacctggactgagcgaccacgtgagcgctgaagcgctgaacagcaggggccccggagaattctccggggcccctgctgttcgatgtgggacgtagtggctcagtagccgatggacttgatggtgtccttcaacacgttggccgacgccgtcagttcctggtgttcccgatcggtcatcggtacctcgatgggccgcacgatgccctggttgctgatcagggttggcaccgacagtgcgacatcggaaatgccgtaatagtcgtcgaggatgctcgacaccggcagcatcgagggggtcgccgacagcagctggtccagcaggaatgaccccgacaggccgatcgcatagttcgtggagcccttgccggcaatcacctcgtaggcggcatctgccacgtccttggcgatctcattggtggaggcatcggtaaacgggcggtttccctgctcgtcggtccactcgaggatgggggtcacgccgatgcgcgcactcgaccacagcgcgaactcggtgtcgccgtgctcaccggccatgacggcctcgacgttgcgttcacgcacatgcgcccggcgcgcaatcaggtggcgcaaccgtgcggtgtccagtcccgtgccggtcgcgaacaccctgttggtgggaagcccggacaccttctgcgccaccacggccagcacatcgcaggggttggcgacgatcacgtacagggcgtcgggggagacctcgagcatcttgggcatgacgtcggcgatgatcttggcgttgatgccggccaggtccagccgtgactgacccggcttctgcggtgcgccggaggtgatcacgatcacatcgcagtcgcgcatcgaggacacatcggcgccgccgatcacctcgggctcggcgaagatggatccgtgggcaaggtccgccacctgggcatccacgcgcaacttgtcgatgtcatagaggctgatgatcggtgcggtgtcgcggatcaggcaggcataggcgagggccgagccgacttggccggcccccacgatcccaactttcggaaggtctctgcgcagcggcgcattggacatggttgtctccttaaagagagtcgggccgtgcccggtctcgaacgacccatggcatcagcgacccgatgaatatgtctgtggacatcttcaacgtagcggctctcaggggacagcggttacttgtgaccgcttcggggcatctggtcagttgaccaagctcacatcgccttcgagcttcaccgcaacctgcttaatcttctcggcatgggcgcgggcgtggtgggcgcagaagaggagcacgccaccgttggccaggcggacccgaaggtgtgcctgggcgccacagcggtcgcaacgatcggccgcggtcaactgggtgttgtccatcactgtcatgctcacatctcccaccctacgtggctgggccaagccggggcgttcggggaaccaaccggcgtggccggacagtgcgccgaccaagcggtcgcggacgcgcagcgctggtggtggtgatgtgcccggatgagttctgtgggcggggccgactaggctcaccacgtgccagattcccagtccaccgcttcccagtccaccgcaaagaagtcagccccgggcaaggccgcgcaggccgggcgtgaatacgaggccaagaacctgctcgtgctggaggggctcgaggccgtccgcaagcgtcccgcgatgtacatcggttcgaccgacacccgggggctgatgcattgcctgtgggagatcatcgacaatgcggtcgacgaggcgctggcaggctttgggcgccacatcgatgtgcggctcaacgccgatggctcgatccatgtgggcgacgcggggcgcggcatcccggtggacattgagccacgcacccacctcaccggggtcgaggtggtcttcacgaagctgcacgccgggggcaagttcggtgcgggcagctacacggccaccggtggcctgcatggcgtgggagcgtcggtggtcaatgccctgagctcccgcctggacgtggaggtcgatcgcaacggccacacctgggcgatgagcttccaacggggcaagcctggtgtcttcgacgggcccgggccctcggcggggttcacccccgggtccggactgcgcaagacgggtaggactgccaagggcgtgaccggcacgcgggtgacctactggcccgaccgccagatcttcctgaagcaggcccagctgtcggccgagcagttgctcgatcgggcccggcagaccagcttcctcgtgccggggctgcgcatcacggtgaacgacgaccgcggcgaggagcccgtggagaccaccttccagcatgagggcggaatcagcgagttcgtggacttcctgtccgtcggcgaacccatcaccgacgtcctgcggttgcagggcagcgaccacttcgtggagaccgtcccggagctcgacgagaacggcgcgatgacccccaccgatgtcgaccgtcgcctcgacgtggatgttgccgtgcgctggtcgaacaacttcgacaccgtcgaacgctccttcgtgaacatcatcgcgacgcccaagggcggcacccacgtccagggcttcgagcgaggcctggtgcgggccttcgccgccggactggagggaacccggctgctcaagagcggcgaggaggtcatcaaggacgacgtactcgaggggatgaccgcggtggtcaccgtgcgactgcccgagccccagttcgagggccagaccaaggaggtgctcggcaccccgccggtcacccgattggtggccaggatcgtcgagtccgaactcaccgagttcctgaagtccaccaaggccgccacccgggcgcaggcccggttggtgatggagaaggccgtcaacgcctcgcggacgcgtctggccgccagggcccatcgggagaaccagcgccgcaagaacgcgctggaatcatcgtcgatgccccccaagctgaaggattgccgcaatgccgatggggagcgctccgagctgttcatcgtcgagggtgattccgccctgggcaccgcgctgcgggcccgcaattcggagttccaggcgctgctgccgatccgcggcaagatcctcaacgtgcagaaggcctcgattggcgacatgctcaagaacgccgagtgtgcctcgatcatccaggtggtgggggcggggtcgggcaagaccttcgacgtggatcaggcccgctacggcaagatcatcttcatggccgacgccgacgccgacggggcccatatccggtgcctgctggcgaccttgttcttccgctacatgcggccgatggtggaggcggggaggatattcagtgccgtcccgccgctgcaccgcttcgagctgacgaacccgaagaaggggatggagaagtacatctacacctactccgatcccgaataccagcgcaaggccgccgagctgaccaagaagggcatccacttcaaggagccccagcgctacaagggcctcggtgagatggatgccgaccagctggccgacaccaccatgaatccccgccaccgcctgctgcggcgcatcaccgtggacgacgcggccggtgccgccgatgtcttcgaattgctcatgggcaacaatgtcgcgccccgcaaggagttcatcgtcgagggtgcctatcagctcgacgaggaccgcatcgacgtgtgagccgcccgtggtgggcgcatcggcctattgggcgtcgttacgccgcagcttgagcacctcgtacatcaactcgtgcaggggagtgggaaccccggcctcgcggccgtagcgaacgatggccccgagctgcggatccagctcgctggggcgtcccgacatgatgtcgcgctgcatcgaggtggtcgatgacggcggctgggcctcatcgaaggcaacggtgtcggcgacgatcccatagggcatgtcgacgccccgcgccacggccacgtcacggatctcggtggtggcatcgatcaacacccgacgcagcccctgacgggacaacaactcgcccagggggaggcccgtgatggcccccagacctcccggcggcaccacgaacatggactttgcccacaacagttcccagacgtcacggggcacgggggagccgatcccggcatcctcgaaggccttgcgcagggcggtcacgcggtcggagggctcattggtccactcggccacttcgagcgacccggggccgccgcggaactcggtgacgccgggctcgcgggcggccacataggccttcacgaccccggggatggtgtgttcgcggccgacgacactggcggtcaggcgcggcccgtccacgccgttctgggtggtgatcaccgcggtgtcggagccaatcagggccccggcgggttccagtgcgtcgatcacctgggtggccttcactgccgagatcacgtagtcgacattgccgatattggccgcgtcgtcggtggcctgcaccgtcaccgtgtcgcgacgcccctcggtgatgatgctcaggcccttgtcgcgcagcgcctgcagggtggcaccccgggcgacgaaggaaacgtcatggccggcgtcgatgagccgtgccccgaaatagctgccgaccgcgccggcgccgatcaccgcgaatctcatggcctcagcctctcacagcggccaccgtcccgggcgccgccgaccctggcaggccacgggccgagggcagtgccccacgtcgctggcctgtcgccgcgggggtcctcagtgcggcatggtgcgggagctcaccgcggtgatcggccaggtcgccggggttccggaaccatcacgcttgccggtcgcgggcgggaggtccaccggcgaaccgtccgcaccggcggcgatcaccggctgtggtccgacccaggccaacaggagcccgtcctcgcccttcaggaagcggtggcagcgcaccccgccggtggcccggcccttgggtgggtagtcctcgaacggcgtcaccttgacgcttccggtctgggctccgggcagcatgctcgacgtccccgacagggtcaccaccacggcatcggtggcggggctcacgccgaaccacaccacggaggaacccccggtcaggcgcacgccggccacgcccccgccgctgcggccctggggacgcaccaggtctgcggcgaagtgcagcagctgggcatcactggtgacgaagacgagctcatcggacgggtcagtcaattcgacgccacccacgacctcgtcgttgtcctcaaggcggatgacatcccattcgtccttgctgaggacctcggggttgacccgcttgacgaccccgcgacgcgtgcccagggccaggcccgcggaatcctcggccagggtggtcagccccacggcccgctccgcgtcggtgagcaccagcaggtcctcgacgcgtgacccacctcgcaggctcggtgcgttcgcggtgcccacgacctccggtaggtcgattgcctcggccttcaccagccgtccgtgggaggtgagcacaccgaactgggcgtgtgcggtcacggcaattgccgcaacgaccacatcatggcggccccggggaccgcttgtgggcaggtgcccgggatcgtccccgtccgcggggcgcgtcatgcgggccatcaatccggtggagctcatcatcacccaacaggggtcgtcggggatctccaggggctgggcaggcagggccgccgcggcccctgacccctcgagcagcacggtgcgtcgtgggctgccgtaggtggcggccatctcactgagctgggaggcgacggtgtcacgctgcaggtcgggatcgtcgatcagctcggtgagctcggtgatgcgccggcgcagctcgtcgcgttcggtctcgagctcgatgcgcgacagcttggtcaggcgtcgcagctgcatgtcaaggatgtagttggcctggatctcgtccagctcaaaggtctccatgaggcgctggcgggcctcggggacatcgtcggatgaccggatgatcgcgatcacgtcgtcaatgtcgatcatggccagcaggaggccctcgaccaggtgcaggcggtcctgggccttgccgagctggaacttggcgcgcctcaggatcacctccaggcggtggtccaggtagacctgcagcatttccttgagcgtcatcgtgcgcggctggccatccaccagggccaccgcattgataccgaaggagtcctcgagcttggtgtgcttgtacagctgggcaagcagggcctcgggattgatgccgttcttcacctcgatcaccaggcggaggccatgggtgaggtccgtgaggtccttgacgtcggagatgccggtgatcttcttcgaacgcaccagcaccttgatctggtcgatgatcttctcggggcccaccgcgaagggcagctcggtgatcacgatgccccgacgtcgggggctcacctgttcgatccgggccgtcgcgcgggtgcggaagataccgcgcccggtcgcataggcggcgcggatgccgtccagcccgacgatctttccaccggtcggcaggtctggccccggcacatagcgcatcaactcatcgacctcggcgcccgggttcttgagcaggtacttcaatgccgccacgacctcgcccaggttgtgcgagggaatattggtggccatgccgacggcgatgccggtggcgccgttgaccaagaggttcgggaaggccgccggaagcaccgcgggctcgagttgcttgccgtcatagttggggcggaagtcaacggtgtcctcgtgcaggccatcgagcatcggcatggccgcgggggccaaccggcattcggtgtagcgcatggccgcggggccggcatcgagggatccgaagttgccgtgcccatcgaccagcttcagccgcatcgaccagtcctggcccatgcgcaccagggcgtcatagatcgccgaatcgccgtgggggtgcagctttcccatcacatcgcccacgacgcgtgcgcacttgacgaacggatggtcgggggtcaggcgctgctcgctcatgccgtagaggatgcggcgctgcaccggcttgaggccgtcgcgcgcatcgggtagtgcccgggcatagatcaccgaataggcgtactcgagatacgacgtctgcatctccgacgagacgtcgacgtcaacgatgcgctcctcgaagtcgtcggcgggcggcgtctttgtgcgtgccatctgtgcaagaactcctgactactgaccgctgggaagtccgcggcctgggcgtgccccgcgagaatagtccacggcacggacatggcccggcgtcggcgtcgcggtggatgtcgatcccgggtgggtcagtgtccgggatcggttggctggtcggggccagtggcgctgtgctgctgctcacgcagcaccgcgagcagcaccggggcaagggcctggccatcggctccgaggacctcggggacgcggcgccgaccgcgtcgcgacgagcgcgtgtcaagccctcccacggtgccgtgcgccagcacctgctcggtgggtgacagggtgcggatcgcgatggcccgcacgcgggacccacgcactgcggcgaactcgcggtacagggcctgatcgtgttggccgttgtcgccgaccaggacccatcggatgtgcgggaaggcgtgggcgagctggaccagggcggcgcgcttgtgggcacaacccgagcgcaaccaccgggtggtggtcgggccgaggtcggtcagcagcatcgggcccggggggaatccgtggcggtccatgaaacgcgtcaggaagggcagggcggtccacggcccggtggacacgtagaccaccggtgcgtccgggcgaccggcaagcagctgtcggtacatgcgggccatgcccggcacggcctggcgattgacctcaggttggatgaagctgttccaggccgcgaccagtggacgcggcagggacgtggagatgatggtgtcgtcgatgtcggagatgatgccgaagtcctggtcgtcgccgatgacctgcaccggcgccccgacctgttctgcgcccgggctgtccaggcgcacctggtgccagcccgccgcgagcccgggcgtgtcaatggtcgtgtccaggtggccacgacgatccgtggtgaagcggtgggccctgcccgaaatggtgacgctgatgacgccattcggcaccgggacagtgaagaaattgcgccaaccccgtcggttcagccacagcggggagccgatgggccacgcccgatggcgccgcgccggtcccaggacgagttggcccaggacccggacgcgcgacggcgtgccaaggccggtgaacggcacgatccgtggtcgccaaccggcacgcctcaacgccgagcccaggtgacgcgtgacgaaatcgtccagtcgcgcaccgaaaaagggacgacgcttcatacggccaacactagtgggcgtgccccgacgggcccgttggtggcaggatgagcgggtgatcaccggctccgcccatacccttccgacggccctgcgcacccagatcgccgattgtggattcttcccccagttcgtcagcgattccgtgtccatggcgctgggtgacgagcccctcgtcgaccacctcgtgcagcaggaggccaccgttggaccggagggaatcatccgccacctgaccgtgctcgtcctgacggcggcacgcctggtggtggcccacaccgacgagaactccgatgagcatgatcgacccactgcggtgaccaccacggagtccgtgccactgtggcgcatgggggccgtctccctgtcgcgcgtcgtgagccacccggaggactacggcgaggcgaactcgcaggtcgtggagacctggctgtcgctgtcctgggacaccatgcatcgcctggaagtggttccggtccactgtgtcgacccggaatgccgggccgatcacggcttcaacggcgaaatggtgtcggaggacatcaccctgcgcatgagcccggccgccgatgggcaggcgaacgtggatcacctcgtgaactttgcgacccgcctgcagcgcatggtcgcggccgccgggcggggctgagccgtgagtggctatccgcttcccgagccgccctcgtacggtcgtgcgaccctggccgagctcctaccggccgtggcccatcacctcgcgggggacaggctggaggccaccgaccccttcggccttccgccagcgcgcgcctatgtgctcctgctcgtcgacggcctgggctggcgccagctcaatcgccatctgtcgtcgctcgcctatttcccctatctgatcggcgacggccgaccgatcagcgctgcggttccgtccacgaccgcggtctccctgacgacgctgggcaccggactcccgccgggggagcacggcatcgtcgggtactcattccgctccgcgcccgggcagggggtgctcaacgcattgcagtggggttccgatgatccggtgcccgaggaattccagccccatccgacgtggttcgagcggctcaacgacgtgggggtgcgggcgagcagcgtgggacgcgccctgttcgccgacagcggcctgacccgtgccggattgcgcggcgcccactatgtcgcgatccccgatcatgcgggggctcgtgagcgcatcgatcgggtgctggcggccacgagcgggccgggcccggcgttcgtctacctgtatgagggcgaccttgaccacacgggccacggccatggggtggattcacccgcctggcggggagtgctggagcgcatcgacgcagacctgtccgcgctgcgcgacgccctgcccgccgacacctgcgtgctggtgaccggtgaccacgggatggtggatgtgccggcgcgcgaccacatcatcatcgaggacgacgagcggctcgcgacaggcatcgacatgatcgccggtgagggacgcttccgacagctctacagcgccgagcccgcggcggtggtcgagcgttggcgtgcggtgttgggcgagcgcgcctgggtctgcacccgcgaggagggcatcgcggccggttggttcggtcccgaggtgaccgaacgcgtgcggggtcgcctgggcgatgtcctggtggccatgcgggccggcggtgccgtgatgacgcgcacgcacccgggggaacttggcctggtgggccagcacggctcgctgacatccgaggagatgcaggtgccactgctcatcgatgagggctgggacagctgacctgacgggtcggccggagggcgcgacctgcagccgaccgccccggcacctgcgcggccggtgggctgcaaggactggggaccaggactggcgatggtgcggtcagtccttgtcggggcggcgctccccgaacatgatctcgtcccagctcggaacggtggcgcggtggctcttgcgtcgcttggtgggcttcttggccggctgcgtcgccgacccatcgccggcgaccaggggttcctgcccgctggcggagtcctgatgcgcagcagccgggcggggcttggccggggccttgtcgggctccttggccttgtctgccgatgacctgcccccgggccccttggagggtgcctgatcggctgacgacgggtgtgacgccggcttggctgccgacgtggacgtggccgcagaggaacggtcggcgccggaggcggtacggcgcttgcgcgtcgcccggggcttcgtcggcgcggaggccggggtggcggcccggggctcatcgggtgattcgcggtgctgcagcgccgcatcgagggcgggcgtcgagtcgtcgcccgcggcgtccgccgcgtcggagggccggccgcccctcgaggcctcctcaccggtgtgcacggcctcatcggtgtccgcggactcattggtatccacggcgccgtcacccaggctcaccggtcgacccaggccctcatagacgtgcacggaatcctcgtcgaagcccgccagcatgtcatagaggacgtccatgtcggaggtgggattcggcacgatgtcgtagacgccgtccacctcgcgcaggccgtcctgatcggtgccgctacccgttgaggtggcgtcgttggaggcggccgctgcgtagagctcctggagggcactgccgtcgccgatcaccggcgtctcgtcgtcctggacggcccgcacgatggccagttcgtcattcaggtcgatggtcggttcggcatcagggttctgggtgcgggtgacgggactctccccgcgatgcgggggctggtcgtcgatgagccatcgcgcgtcggcgttctcggcagtcacgaagcgaccgcgcggatcgaagtcgaacagcgcctggtggtcggtctcgtccaggcggtaggagatccggatcgtccagtggcggtcggcctggtcctcccggcggaaggcgccccacaggatggatccgtcagggaccccctcgcggcgcagcttggtgttgatgaactgctcgagtggctggggggtggggccggaatcgcgacgggcctgggccacgcgtgccagctcgctcatgtgatcgcgctcggccagcaccggctcggcaaagccgtcgagttcgtcgacactcaccccggcagcacgggccacatcctccacagattcccctgcgcgaatgcgggactggatctcccgcggcgtcaaggcgctgttcatatggtgtctcctgcgtggtgctgcggaaatgcggccgtcggcacgttcatgtggtcgtcgatttgcgtggcgacgaatactggatcaaacctaccgcgagcaggctgttcggggtcgcggcacctgaaccactggtatagggtccgggacccgcccgcgggcggcgaaggacccccacgtatgctgcgattgcgtttcagggaatatcaggtagcatgccgacgtttgccgggcgtgtgcacctgctgcgcaccggcaagaccgttaacacggcacagattcgagaggccacgatggcgactgattatgatgcaccccgcaagtccgacgatgaggctcgcgaggactcactcgaggagctgaagagccggcgcaacgacaagaattcagggaaggttgatgaggatgaagctgaggtcgccgagaccttcgagcttcccggcgcagacctttcccacgaagaactgacggttcgagtacttccccgtcaggctgacgagttcacctgcgccggttgcttcctggtgaagtcccggagccagctcgcggagacccgcggcggcaagatgtattgcgtcgactgcgtctgagcgatgagcccgcgcgcagcctgaccgccgattccccctgacgtccatcccgcaagggaacagtgggcgcacgaaccttggttcgtgcgcccactgtcatgtccggacgggttacccggccccgagctcgtcggccgcggcctccgagcgcgtggcgacgaagcgctgcaccagcagggcgagcgtccccagcagcagggtgctgccgatcgaccacgcataggccttgacgggcgacaccgtgggatctgacgggtccggcggctcctccccggtgacggtgtgccatccggcggtggccacgcgctgaccggcgaaggcagcagccgcgccgagtactgcaccgagcaccctgaactgcatcttgggcttggacatatctctccgtttcatccagtcagacgccgtgatcgcaccgaatcgggcgggcatctggtcgcctctccatcctagggagcccgcagcgaccccgtggcaccagcccgcgcccgctccggcgccctgatgccgcgcgcgccccgccaccctgatgccgcacccgcggcatggcatcgccgcgatgcggtggagcatggcccccggacggcttccggcacgttagtctggggcgggcgcgtggcgtgatcggtgcccgccacggttgcgcgccgctgatcgtggtgccacgacgcagcgcagcagggcacgacaactaattcaagagacaaatggtggagcactcgtgatctttggcagaaggaagcatcgcaaggccgacgacgcggatgaggtggaacaggccgccgagtccgatgtcgtcgaggatgcgcaggccgtggccgcaggcgacggggccgatgagtcggagccgatcgacgacgacgagtcgctcgatgatgacgaggccagcgactccgaggcctccgagcccgacgagtgggaacaactggacgagtcgcgcgactggcgcgccgatggccccttcgacatcagcgaggtcgacctggacgccgacgatgtgcagcgcctcgacttcgactcactggtgctcacccccttcgagggcatgaacatgcagctgcaggtcaaccaggagacccaggatgtccaggcactgctcatctcgcaggggcagtcagtactggaattgtcgctgttcgccgcgccctccgaccgcagcatgctgccgcgggtgcgccaggacatgatcgccaatgtggagagcgccggaggttcggcgacgctcgccgagggtcccttcggcacggagatccgtcgcgtcgtgccgatcacggccgagaacggccagcacggctatcacgtgtcccgtacctggttcgcccagggccccaggtggctgctgcgtggcgttctgatgggcgaggccggcatgtcggagggcaccggcggcccggccgaggtgctctacgagttcttcgccaacacggtggtacgccgcggcgacaagccgatggtccccggagatccgatcgccatggcgctgccggatgcgatgcgggcacagctggatggccaagcgggtgctccccaggggcaacagtgagccttggcagcgccctggcggaatccgccgtggggcgctggctgcgccgcctcctgcggtcgaacgaggaactcgtctccgaggagctcgtgacccaggcagtgaagtcgggtgcgactccgatcgccgaggcacgcgatcgcacccgcgtcaccgtgcagggcaccgtcgcgatcctgaccatcaatccccagaagcgccattcctggctggaggccgacctcgtcgacggttccggcacgctggtgctgctgtggatgggacgcgggacgatccccggcatcacggccggacgccgactgcgcgtccatggcctcatcagctcacgcgacggacgtcgggtgatgtacaacccctcctatgaactgctgggctgaccagccctagcccttcgtcaccggcaccaggtaatgcgacagctcacgctcgtgttcctcggaaatggtgaacaacagctcgtcacccacctccaccgcggcatcctgctcgggggcacgggagcgtccatcccgcacgatggcgaccagcacaccatcgccggggaagctgaggtcgcgcaccctcttgcccacggcgggggagtcctcgggcagggtgagctccaccaggttcgccgagcccttcttgaaggtcatcaggcgcacgacggcaccgacgctgacggcctcctcgaccagggccgacatgatgcggggtgttgagacggccacgtccaccccccactgctcgtcgaacatccactcgttgctcggatggttgacacgggcaacggtgcgtggcaccccgaactccgtcttcgccaacagggtgtgcaccaggttggccttgtcgtcaccggtggtggcgatcgagacatcgcaggtctgcaggtcggcctcggccagcgagtccatctcgcaggcatctgccagcagccattcggcctccggcacggtgtcggacttgatggcgtgcggctccttctcgatgagcaacacctcgtgtccgttggcaatcagctcacgggcaatggaacgaccgacattgccggccccgacaatcgaaatacgcatcgtggattccttctcagttctgctcgggcgccgcggcgagcgtgcgcagcaccatctgggcacggtcattgctcgttgccacgtagatcacatcgccctcctgcaacagcaggtcggccgagggcacctcgccggtgccgatcctggtgaggaagggcacccgtacccggagcctctcctcgagctggcccaccgatgttcccgcccacgcattgtcgaagggcacctggaacagggcggtcatgccggagggatcgcgccacaccggggtgacggagtcggacaacagtcggttcatcacctggccggcggcccaacgcaccgtggccaccgtggggataccgagcttctcgtagacctcggcccgtccctggtcgtagatgcgggcgaccacgttctggacgccgaactcctcgcgtaccacccgggccgacaggatgctggagttgtcgccgctggcgacggcggcgaagccatcggcctcgcggatgccggcacgcaccagcacatcgcgatcgaacccgacgcccttgacggtcttgcccgcgaaatcgggcccaagcctgcggaaggcctccacgttgacgtcgatgacggccagcgagtggccgcgcttctcgagcgcgcgggccaggcttgagcccacccggccgcagcccatgatgatgatgtgcactgatacctccactggccccaccggtcggtggacagccgtgccgacatggtcctgggaatcggggtcaatcggcctgtcaccccgaggaaaaggatagctgcgtggtgcaacgagggtccgctccatcgccatgcaaccaagcggtacacggcaggcgttagggttgtcgctcgtgagcgtcactgatgccttcaaacgtgtgctcgtcggccgcaagctggccagcacgcaactgggggaaactctcctcccgaagagggtcgcacttccgatcttcgcctccgatgcactgagctcggtggcctacgcacccgacgaggtgctgatcaccctctcgttggccggcatggccggctttgccttctcgttgccgatcggcatcgcggtgggcgcggtgctgttggtggtggtcatgagctaccgccagaccgtgcacgcctatccctcgggtggcggcgactacgaggtggtcaccacgaatctggggcccaccagcggactggtggtggccagcgcactgttggtcgactatgtgctcaccgtggccgtttcggtcagctccggagtgcagaacgccaaggcgatgatgcccttcatccagggccacgaggggctgatcgcggccgtggtgatcatcgtgctgatggtgatcaacctgcgcggcgtgcgcgattcgggtggcatcttcgccgtcccgacctatctgttcatgttcggcatcggggtgatggtcatctggggactgctccagatcttcgtcttcggacatcccctcagggccgcaaccgccgactacaccgtggttggtgtgagccgctacgagcccctggtggggctgggcatggtcacactgctggcgcgcaccttctcgtcgggctgcgccgccctgacgggggtcgaggccatcagcaacggcgttcccaatttccgcaagccgaagagcaagaacgccgccaccacgctgctgctgctgggctgcatcgccgtgagcatgctgctcggcatcctggccctggccaacctcaccggcgtgaagatgtccgacgtcaattccgggagctatttcgtcacccccggcggtgaggagatccattccgatccggtgaccgtgatcggccagctggcacgggccgtgttctacccgggtttcccgatcggcttcttcttcgtgatcacgatgacgatgatcatcctgttcctggccgccaacacggccttcaacggctttccgaccctgggttcgatcctgtcgcgcgacgggtggatgccccgccagctgcacagtcgcggcgatcgcctggccttctccaacggcatcatgaccctggccgggggagccgtcctgctggtcctgatcttcaatgcatcggtgacggcgctcatccagatgtacgtcatcggagtgttcatctcattcacgctcagccagctgggcatgctgcggcactggacccgccacctcaggagcgagaccgatccgtcggcacgccgcgtgatgcagcgcagccgggtgatcaatgccgtgggcatggtcatgaccggcctcgtgctggccatcgtgctggtctccaagttcatctacggggcctggatggccctgctggcgatggccgtggtgttcatcctgatgcgcgccatccacagccactacgcagaggtcgcggccgagaccaccatcaccgatccggcggagtgggtgctgcccagtcgcgtgcacgccgtggtgatggtgaacgcggtgaacaagcccaccgtcaaggccatccagttcgcgcgggccacccagcccggtgaactcgaggcggtcaccgtcgacgtcgacccggacgcgacggcccgcctggtgaagcagtgggatgacgacgacctgtcggtgcccctgaaggtgatcgactcgccgtaccgccagatcaccggcccgttcatcgactatgtgcgggccctggtcagcgagaacccgcgtgacatcgtgtgcatctacatccccgagtacgtggtggggcactggtgggagcatgtcctgcacaaccagaccgcgctggtgatccgcgcccggctgcatttcatgcggggggttatggtcacttccgtgccctatcaactcgaatccagcgcgcggctcgccacgcgttaccgtcgccgtgagctcaggcgtccccgccggtgacgactgtggcaacggcggtcggtgagatcatcgggccgctctcggtggggcccattgcccatggtggccactgcatcgcccgccatgagggacgcgtcatcttcgtgcggcatacgattcccggcgagaccgtgatggtcaggatcaccgacgacagccatgagcgctactggcgcggcgacgcggtggaggtgctcgacgccgcgccgggccgcgtggagccgccgtgtccgatcgcgggcctgtgtggtggctgcgatttccagcacatcgcgccggcggtgcaacgcgagctcaagaccaccgtggtgcgcgaactgctgcaccaattcgcccacctcgactccgatgtcaccgtggaacgcgtcggcaccgacgacagcggccaggactggcgcacccgcatgcgctatggcgtgcacgatgggaaggtgggcctgcatgtccaccggagcgccgacctggtgggcctggcgccgcagggctgcctcatcgccgagaaggccggccgtgatccgaagatcctcgactccctggccggacaggtgcacggtgatgagctgattgtcgccaccgccgccagcggcgtctgcgtgatcgactccggcaggacgctgatgggtgaggcggtcgtcaccgaacaggtgggcacccattccttcagggcgcgcgccgacggcttctggcaaccgcatcgtctcgcgcccgggctgctcacctcgcagatgctgctggcccttgatccccggcccggtgagcacgccctcgacctctattgcggcgtgggcgtcttcgccgccgcactcgacgatgcggggtgtcgggtgcgggggatcgagatggatgggcccgccatccgtctggcacggaccaatgtgccccgggcccaattcgtggccgggcgtgtggatcgggtgctgtcgcgcggtcgccaccgcgccgacctggtggtcctggacccgccgcgggccggggccggcaagcgggcggtcgaccagatcgccgggctgcgtccgcgtcggatcgcctatgtggcctgtgatccggcagcgctggcccgtgatcttgcctcattcgcgaggcatgattattcggtgaccaatatcaagggcttcgacctgttcccgatgacccatcatgtcgagtgcgtggccaccctggagcccacccgatgagcgcgccaggggcgtcaccggtcaatccggtggacgccgggccagccacacgacgcccgcgcggacacaagccacccgggaccgtcacgccacgctgcccgctgcgtcccgacgagccctgcacccaatgtcaggcctatgcgaccggccccgatgattgtggcctggtctacctggtgatgagcgatcccgatctgctggagatctaccgcgagaagcgccgggaagcgcatcgggccgaccaccccgaaggatgatcggcccgacgactcaggtggttctgcgcacggctcagtaggcgaagttccacagggtccagctgccggctccaccgggaccactggtctcggacgatccgtgcagtccctcgcgtcccgcgggtgcctgccagcgggcgaggcggtcggggtcgtcactggccagtaccgggtcgccgaagccgcccaggtagctgccgtcggggcgcggcgtgatgcccagtgcctcggtgtcgcgctcgtcgacgaagcccggcgtcgtgaacaggtcgcgcatataggcccacaggttcggcaggtcgtgcacgcgtagggccttgtcccgcaggtcgatcgggaagccggtgacataggtctggtcaaagctggcgagcgtgcagaacagccgcacatcggagtcggtcagctggtcgccgaacagatagcgacgggtcgccagacggtggtcgtaatcacgcaggcgcgcctcgtagacgccgagggccgcgcgggcggcgtcctcggtggtggcgaacaggaccttgtaggggccgttgttcacatcgtcgaacagctgctggttgagcacatcgatctggccgcgcagcgcctccgggtagaggtccggcgcgcccgccttgtggaactgcgaccaggcggtctccagctcaaggctcatcacgtggtagtcgttcatgacgaccttgccggtcttggtgtccaccaacgcgggcaccgtgccgcggccggtgtaggagggatcgccggcgtgataggcctcgttgaggcccttcaggcccagtaccgcgtccttgccgccgggctggtcggcgaacacccagccgccatcgtcgccacggcccgacacataggcaatggagatcgcattctcaaggcccaacaggcggcgcacgatgatctggcggcgagaccatccgcactcggccgagatcacgaggcggtagcgacccgcctccacgggaagctcgcccgaggtgaagcgggcggtgaagtggttcggctggcgcttgaaggcgccgtcgtcggtctgctccttgcggaagatggaatcgcccacctcaccacgcgggcgcgtgttgacggatgctgattcgggaagtgcggtcatcgtatttctccttggtcctggtggatcgcgttgtcgtgggatggcgcttcattgactgctaacgccggggatggcccatctgattccagcgggggtcgatcgctgtcggggatgtcataggtgaacaccagcaggcgctgtccgccgtcgacgacgagggtctcgcgctcggggcggcgcacgaagccgagccttcggtacatggcgtgggcaccggtcatctggggtccggaatggatgccgatccggctgatgccgcgctcgcgggccacctggatggtcttggcgaccaacagggcggcgatgccgcgtccccgtgccgcgggatcggctccgatcatgtggaattcgagctcatcggggtgcgccggctgcgtctgcccgtcctcgccgacgtcgggttcggcgacgaagccgggggacggcgtgagcaccgcaccgaggatcttgccccgttctgctgccacccagatctggtagtcgggtacccacgaggcgatgccacgcagccgctcgatgtactggtcggtgttgtggaaggagctggtgtaggcccgcaccaggaggtcggccacctcgggaaactcactcggctcggcaaggcgcacctcgatgtcgtcgcggtggtggccctgtgctgcggtcattgtgccgttccctccggggtcgctgcggtgtgatggtcgaacagatcggtggagtaatagcgttcggccgtgtcggcgatgatcgtgacaatcacctggccggccgtctccgggcgcgcggcaaggatgcgcgcggcggcgaccgcggcaccggaactgatgccgacggcgagccccgcgtgacgcatcagttcgcgggtggtgtccagggcctcggcctgggggatgtcgagggtctggtcgatcagcgccagatcggtgaccggcgcggcggccgggccccccgagatgccctgtatcttgtggggatgccactgtccgccgttgaggactgctgactcagcgggctccacggcgacgatgcgcaggcccgggttgcgttcgcgcaggaagcgacccgctccgctgatggtgccaccggtacccactgccgagacgaaccagtcgacgtgtccgtcggtctgttcccagatctccggaccggtggtggcgtagtgcgcggccggattggcggggttgccgccctgaccggccagccaggcccccggggtggacgccacgatctcggctgcgcgcgccccggccgccggcatgccgccctttccgggggtgaggacgatctcggcacccagggcctcgatgagcgcgcggcgctcaatggactggtcgtcaggcaccacgatgatcacgcggtagccgagcaccccgcccagccaggccagcgagatgccggtatttccgctggtcgcctcgacgatcgtgccgcccttggccaaccgggcatcgcgttcggcggcacgcaccatggacagggcggtgcggtccttcaccgacgatgaggggttgaagaactacagcttcgccaggactgtcccgtatcccgattcgaactggggcagatgcagtagcggcgtatcacccaccaactcggtgagatcttcggtgatgccgggatacacgtgacctgccatggatttcctatcgcttgatcgatgatcccctgcgggaggacatgcagggagaagagcttgtggcaacccctcaatgggttgcgtgaccgatcaacgacagcagggcgcaacggccgacatcacaacggccgacatgaggtcggcacgggggccggccttcatggcaaggaccatcaactgctgcatggcgctcacgataacaccgcagggaaagggcttgtcgcagcgccatctggcaggatttcgctgctggaggatggtgttggacagcttgcccggggcggggtgcgagcgcctatgctctggttcgtgagccttcaactagtcgtgcgcccgcacatcgacctggtgcgcactgacagttgtctgtgttgttgagcgcctgaggccgccgtccggatggcatcaggcagagccggtggacgcaacgcgtccgaccgaaggcccccgggccccaccggtgggtaaccacacaccccgaagagaagctcatgtcaaccaagtccacgaccgtcggcttccagctcgcagcgccggaagcctcacatatcgccacgtccgagaacgcacacgagatcggcgcccacggggaattctcccgtcaggacaatgccttcaccacgcccttcggggacggccccgggcaattgccggtggaggcggggcgctaccgactgatcgtcgccaggatctgcccctgggcgcatcgccagctgatcacccgggaagtgctcgggctcaccgacgccatcagcgtgggggtgacggcacctgtccgcaccgacaacggctggcgcttcagcctcgaccccggcgacaaggaccccgtgctgggcatcgagtacctcaacgaggcctatctggccgccgatcccggctatgaccgtcgcggcaccgtgccggcagtggtcgatgtcaccaccggcaaggtcgtgcagaacgactaccaccgactgtccaactactgggaagtggcgtggcgccggctgcagccggacgatgcccccgacctgtaccccagctccctgcgcccggcgatcgacgagatgagtcgcctcaacttccacgccgtgaacaacggcgtctacaaggccggcttcgcccacacccaggaggcctatgagcaggccttcgatgcactgttcgcccggctggacgcgctcgagcaattgctgggccagcagcgttttctgctcggggagcacatcaccgactccgacgtgaggctcttccccaccttggtgcgcttcgacaccgcctactacgtggccttcaggaccaatcgcaatcggctgatcgacttcccgaacctgtggaactacgcacgcgagctctacgcgatgcccgggtggggatccaccaccgacttccaggcgatcaagctgggctatttcggctcgacgaatgtcaccggggccgccagggtcatcatccccaagggccccgacctgtcgggctgggaccaggccagtacgcgggccgagcagttcggcgatggcgacgtctacctgcgccactgaggccgtccccgcaacccgctggcccgtgtcaccgtgatgtcgcgtcgcggtgaggccaccggaacctccatgcccctgaattcctgacgaacccaccaaggaccaccatgaccgccaccacccgcatcactcccgaaccggattcccaacccggggacatcaacaggcagggccagttcaccgatggccccagtcaccatcgacgcagcctggccggggccgtgaccggcagcacattggaagtcttcgacttcacgatctacaacaccttcgcccccttcttcgcggcgtccttcttcgcagccggaaatgcaaccactgccttcctgcagtcgctcatcgtgctcgcggtcggcttcatcgcccggcccctcggctcgctgttcttcgggcacctttccgacacccggggacgccgcatctcgctgtatgcgaccagcgcgacggccctgaccggcaccctgctgatcgccatttcccccgggcacaacctgttgggcatcggtgccgccatcgtgctgatcgtggcgcgtgtcctccagggcttcgcccacggtggtgaacagcccgcagccggcgcctatgtctcagaggtcgccaagccctcgaatcgcggtcgctggtcctcggtggtctacatgtccatcctgggcggtggcgtcttgggctcactgctgggcgccgtgctgtccagctggctcggcgtgcccaccctcaaggcctgggcctggcgcctgcccttcttcgtgggtgcgatcggttccatctcggccctggtgatgatccaccggatgccggagaccagggtcttcacccgggagaaggagaaggtcagggcgcagcactcagggccgggcctggccgcccagatgtgggccgcccgccgatcagccctccagatcatcggcctgaccctcgggctcaccatcgccttccagaactgggcagcgatcggaagctaccacatcgcgatcctcaaggcgaacgcctcacatgtgctgtggatcgcggtcgcggtgcaactggtcgccattcccgtggtcggattgtggggccgcatctccgaccgcatcggccgcaagccggtggtgctcatcggtttcatcggcctggccgtcaccacctatccgttcatgcgcttcctggacggctccgccgcgcgaatggcactcacgatgggcgtctcgtacttcttcctcgccgcgccgctgtcggtgacccccgcgttgatggccgaattggttcccacccgcattcgcaccctgggtgtcggcttcccctacgcactggccacggccatcttcggtggcacggtgcccatgctccagagctggatctacacggccttcagccatacggcattcggaatctacgtgacggcggcgttggtggtgtcgatcgtggtcaccctgacgattcccgagacccgtggcctggacctgggcgacgatgaggcggtggagcggctcaaccggatcaccccgtccgcgacgggagcaggcgctcccgtcgcgggaggcccgcgcaccctcgactgaccgccgttggaccaccacgatgtcccggtcggggaacgtttcccggccgggacatcgtgtgcgtcagggtgttgccatattgggcgccgggcactacgcccttggcgtgaccggcgcccattggtggtgggccggcgatacgatcgcgacgtcaagggagtgctcgtgacgcagcgaagccgtcgtcctccaacgtcggtggccacccggctcggttcgcgcaagcgcagcacgaatgatcaggaggaactggatgagcgtgaacagcttcggtgcccgctccgatctggcggtcggtgatcgccattacgagatctatcggttggatgcggtgcccggtgcccgggaactgccctacagcctgaagatcctgttggagaatctgctgcgccacgaggatgacctgcacgtcaccgctgatgacatccgcacacttgccgcgtggaagcccagcgatgagccccatcatgagatcgcctatgcaccggcgcgggtgatcatgcaggacttcaccggcgtgccctgcatcgtcgacctggccaccatgcgcgaggcgatggcatccctgggcggcgaccccgagaagatcaacccgctcagccccgcgcagatggtgatcgaccactctgtgatcgcggagaagttcggtactcccgacgcgctgcgcgagaacaccgatatcgagtacgggcgcaatcgtgagcgctaccagttcctgcgatggggacagaagacctttgacgacttcaaggtggtgccgccgggcaccggcatcgtgcaccaggtgaacatcgagcaccttgcccaggtggtctactcgcgcaccgtcgggggagtgctccaggcgttccccgacacctgtgtgggaaccgactcccacaccacgatggtcaacgggctgggtgtcgttggttggggcgtgggtggcatcgaggccgagtgcgccatgctcggccagcccgtcagcatgctcattccccgcgtggtgggcttcaagttgtcgggccagctcgactccggcgtaacggccaccgacctggtgctcaccatcacgcagatgctgcgcgagcacggggtggtcgggaagttcgtggagttcttcggttccggggttgccgaggtgcccctggccaaccgggccaccatcgggaacatgagcccggagtacggctcgaccatcgccgtcttccccgtcgaccagaagaccatcgactacctgaggctgaccggacgcagcgaggagcagatcgaactcgttgagggatatgcccgggcccaggggctgtggcatgaccccgaccacgaggccagctattcggaatacctggaactcgacctggcgaccgtgcgggcctcgatcgcgggacccaagcgtccccaggaccgcatcctgctcgatcaggccaaggacgtcttccagcaggaggtgcccgcctacgtcagcgacgagacggcacccatgagcacgaccatcgatggtcacgaggtgaccctcgacaacggtgcggtcggcatcgccgccatcaccagttgcaccaacacctcgaatcccagcgtcatggtggcggccggactggtggccaagcgcgccgtcgagaagggcctggaccgcaagccatgggtgaagaccaccctggcgcccggatcccaggtcgtgaccgattaccttgacaaggccggcctcatcgagcccttggcggccctggacttcgacatcgtcggttacggctgcaccacctgcatcggcaactcgggaccgttgatccccgaggtcagcaaggccgcccaggacaacgacctggcgatcacctcggtgctgtcgggcaaccgcaacttcgaggggcgcatcaacccggacgtgaagatgaactacctggcctccccgccgttggtcgtcgcctatgcgctcgccggctcgatgaacttcgacctcgcccacgattccctgggtaccgaccgcgacggcaaggaggtctacctcgctgatctgtggccgaccccggccgaggtggacgaggtgattgcgaactccatcgatccccagatgtaccgggactcgtatgccgatgtcttcaccggcgacgcacgctggcagagcctcgacaccccctcgggcaagctcttcgattggaatgcggagtcgacctatgtgcgtcggccaccgtatttcgagggcatgaccatgacgcccgatccggtgcaggacatcgctggtgcccgcgtgttgctgcggctcggcgattcggtgaccaccgaccacatcagcccggcgggggccatcaaggcggattcgccggcgggtcgctatctcaccgagcacggggtgcgcccactggccttcaactcctatggctccaggcgtgggaaccatgaggtgatggtgcgggggacgttcgccaatgtgcgcctgcgtaatcaactcgccccgggcaccgagggtggcttcacccgtgatttcacgaagtccgatgcccccgtggagaccgtctacgacgcctcgctgaactaccgggccgccggcacgccgctggtcgtcctggcgggcaaggaatacgggtcgggaagctcgcgcgactgggccgccaagggcaccatgttgttgggaatccgcgcggtgatcgccgagagcttcgaacggatccatcgctcgaacctgatcggaatgggtgtgctgccgttgcagttcccccagggccacagtgccgacacgctgggactcagcggggctgagagcttcgatatcaccgggcttgacgcgctcaaccatggtgagatccccgacaccgtgcatgtcacggccacctctgcggacgggaaggtgacccagttcgatgccgatgtgcgcatcgatacccagggggagagccactactacatcaacggcggaatcatgcaatacgtgctgcgtaatctggcgcgtgcctgatccaccgtcagcactggtccacagcgccctgcagatcggccccatgggtcgtcgcagggcgctgtgtcctcttgtgccggccattatcaacaaccatcagatggggaacccatgtccttgaacagggatgagactgccgcaacccgtgccgagctgcaggcgaacttcaggctctcgggagtcacattggaggaggcggcgcatgacctgggcaccacgcccgcacacgtgcaggaggtgctggaccttgagccggtgcggatcgaggagccgtgggtcctgcgtgactacctggtgcgcgtcctgcgggccggcaatcgcgaaccgcagcccttcagcaaattggtgggggatccgcgacagcactggttcctggatgccggcttcatcgaggccggcaggctcgtcgcctgagcgcgtctgccgggtcatcgctggctgaagggtcatttttgtcagtgccgacatccatactggatgaatcgaacaaaagttcgatcggtatccggttgtgccgcctcatggatcccctcccgggggagtcggggcggtcggacgaaggaatggtgagagcgatgtcggtggcgttcaagcagtatcgcggggcggacaggcgcgcatggggaatctccgattccgcgcatgcgggtggatcggtgcgtgccctgcccggtacccatgcgcagggcgatgcggatcccgatggtcggccacatcgtgacgggacggcgttgtgcgtgccctcgggatggcccgaatcggtgtccgcacccgggacgcagcgcatggaatccgacgcggtgggtttcctgctggactgctgcccgccggactaccgggcatatcccctcctgcgcagggagcccgtggtgctggcccggttcgccgctgaccaggtcgagggacagcttcgttccacgcgaaaggccctgtctcaggcacgagtggggctgggcgaggtcgtgggccccgaagtgctcgacggggcagtgagcatgctcgagtcggaggaatcgcggctgatccggctgcgccgggcggttgcgctcgtggaggaagccctgcgggggaaggtcttcatgcgcaagctgtaggccatggacccaaggatgatcatgaccctgcccgccgggcccgtggcgtgatggacgccgcgtcgcccagccctagaatggccggcatgggactgttggacgggataagtgagcccgcggatcttcgcaagctctcgcacaaggaattggtgcagttggccaaggagatccggcagttcctgatcaccaacgtcgcccgcaccggtgggcacctggggccgaacctgggggtggtcgaactcaccatggccattcacctggtcttcgattccccccgcgatcccatcgtgttcgataccgggcaccagagctatgtgcacaagatcctcaccgggcgtgccggtgggttcccgggcctgcgacagcgcggtgggctgtccggctacccgagtcgtgccgaatccgagcacgactggatggagaactcccatgcgtccaccgggctgagctggggcgagggcatggccaaggcattccggctccggggtgagaccgatcgcaccgtggtcaccatcgtgggtgatggggccctcaccgggggaatgacctgggaggcgctgaacaacattgccgtggagtcagacctcccgatggtgatcgtggtcaacgacaatgggcgctcctatgcgccgacggtgggtggcctgtcgaagcagttgtccgggctgcgcaccgatccgcgttacgagaagacactggatgtcatcaagctcgcggtcaacaaggcccccttgttcggcaagcaggcctatgagctgctgcacgggctgaagatcgggttgaaggatgtgctcgccccacaggggctcttcagcgacctggggctgaagtacattggcccggtcgatggccacgacctccaggcactgacgacggcgctgcggcaggcgaagggcttcggcggcccggtcatcgtccacgcgatcaccgtcaagggcaagggcttcccctttgcggagcaccacgagcgggatcgcttccatgcgatcggacgcatcaatgagttcaccggtgaaccactgaccccctcggtgcaggccacctggaccgacgccttcggccaggagatggtggacctcggtgagacccacccggaggtggtggccatcacggccgccatgctgcatccggtgggcctggggcgcttcgcggccgcctatcccgatcgcgtcttcgacgtcggtattgccgagcagcatgcggtcgcctccgcggcgggcatggccagggctggactgcaccccgtgttcgccgtctattcgacgttcctgaaccgggccttcgatcagctgttgctcgatgtgggcatgcaccacatgggggtcaccttcgtcctcgaccgtgccggggtgaccggtccggacggccccagccacgatggcgtctgggacacctcgctgacgggcatcgtcccgggcctgcgcttggctgcgccccgtgatgcggaacgcttgcatgacgccctgcacgaggcgctggaggtcaacgacgccccgaccgtcatccgctattccaaggacaagttgcccgacccgatcccggccgaacgtcatgtggggggcgtggacgtcctgcgccatgcggaacgccatgatgtgctggtcatcggctacgggcagatggccggaaccgccctccaggtggctgatcgcctgaccaagcaggggttgggcgtcagtgtcattgacccgttgtgggccctgccggtgccacctgccctggtgcggctggcggcggactattcgctcgtggtcacgatcgaggacggcatggtggtcgggggactgggctcacgggtcgagctggcgctcgatgccgagggcgtcgacgtgccggtgcgcgagttcggcatcccgcaggagttcctgcccatggcgacgcgagccgaattgatggagcagctcgggctgaccccgcgccagatcgcccgcgatgtcacggagttggccatgtcggtgatgccgcatgttgagttcgacctcgatgaccttgatgacctcgggacccaggacgcggatccggcgggccatgcccgcccgggcaagccggtgcgccgccgctcctgagcgcacagcgctggccggcagccacggacaagccggaccccggccgcggggctatgcgctgctgccgtcacccgggccgggtaccgcggccagcagctcggcgaaccgcgctgccaacaggtcctgctgccaatgccgcacgccgtgctcggagagccgcgcgcggacggcctgctcgttgatctgcggcagtggcttccagaccagccagcgcagcgcttcgggctggatcaggttctccggtggcattccgatctgctcggcgatttcattcgccgcgggacgcaccacctgccaacgggcccaggcctccgggtgggtccgctgccatgaatgcgcctggtggggcggcccctcatggggcacccgcatgggcggcagttgcttggcggacagctggccgacctgctgtgacgccgcgacccaccggtcgcggtagcgctttgcataggtgcgtcgaaagcccatgatcttgttcatgtcgcgggccgtcggcatcttctccgagtccttggtcacctcggaggcgagttcgctgatggccttgtcgggcacgatctttcccggtgccttgtccagttcgcgggcaatctcatcgcgctgctcccacagggcgcgcaccaatgccagtccgcgacgtgagcggacatgatgactgccgctggtgtgccgccagggatcgccgggacgctgctgggggtgccggtagacatccaccaggtgggcgaactcctcgtcggcccattccttcttcccggccgccacgagctcatcggccacgaggttgcgcaactcgatgagcagctccacgtccagtgccgcataggcaatccagtcggggggcagcggacgccgcgaccagtcggcggcggaatgctccttgaggaggtgcaccccgaaatgctgttcgatcatggtgcccaggctcacgcgcgggaaaccgaggagccgcccggccagctcggtgtcgaacagccggctgggatacagcccgatctccaccaggcaggggaggtcctgggtggcggcatggatgatccattcggccgatgcgatcgcctccctgagcgcagagaaatcggcgaggctcccgtcggagggctggaaggcctgcggatcgatcagccaggtgcccgagtcggtgcgacggaattgcaggagataggcccgggccgtgtaccggaagctctgggcgcgttccgtgtcgatggccaccggaccggtaccggaggcgagcgcctcgatgcagcgcgtcagtgcctcgggggagtcaaccaactcggggagtccctcatggggcatggcaaggatgggcatgccggtgtcctgatcgatttgtcctgaacgggcaatatcgggcgtggtcgagcctgaatcctggtggctcatctgctgtgtactcgtcccatctggttggtcaacgggatcacgccctccggcaggggtggcatacccgctgcctggcacatcaactgttgccaggcggcaagatgtggcgtgatatcgctggaattgtcgatcagtggagtccagctggcgcggatctccacctcagcctgatcgggctggttgtccatattgccgaacgacctgcttgatacggctgtcaccgtacctgcgggtgctgtgtacgcagcagcgtgctggtccagtgcctcacgcagccagctccacccgacctcgccgatcaggggatcggtgacaatctcaaggtcagtatcggcccgcacatagctgacgagccggaagaaaccgttccaggcgtcattgaaatcgggatcgtgcaacaacacgagtcggcccgcgccgagctgattcgtctcggatcccaggtcagcctcaatggcgaggctgaatggggcaagcccccgtggagacccgatttcctcgatgagcacgtcgggacgccatcgaaaagctctcatgtcgtcgacgatgcgggcaaagaattccgcagcaggactgcctggaagctctggcgccatggcttgagcctagggggagctccatcggcggctgcggtgccacgccgtggcgtcaccagctgatatccgtgatcgccccgggcgctcaattccgcggtaaggcgatatccagcacagttgcaccgggaagccccccgagttcctgcccggaaaccaggagcttggaggagcgcagcccactgccgatgatcaccggaccggcggaggccacgcgcgaatcaatgaggatcggccagtcggcgggaagcccgatcggggtgatgccgccatggcgcatgccggacgccgcttcggcctgcgactcgggtgcaaagctcatcttccgggcacccaggtgcttgcgcacggtcttgttgatatcggccctgtcgacggccaggacgagcacggcagccaatgtctcgacgccggcacggtgacccgagacgatgacgcagttggcgctttcctccatcggcgtcccataggcctcgctgaattcggcggtatcggccagggactcgtcgatggcggccaccttcacatcggggatcccggcggccgctgcggcaaccaccggagccaccagatcgggatgttcggacagcggcaaccacgtcagttcactcatggctcaccattgtccccgaaggctcaggcgctttccccgggttccaaagtgaggctgatggagttgatgcaatacctcaggtcggtgggggtgtcgaagccctccccctcaaagacatgtcccaggtgtgaaccgcaggtggcgcagcgcacctccgtgcgggggcgtccgggtagcgagtcgtcagtgatatagcgcacccggtcggcggccagcggcgaaaagaatgcgggccagccacagtgggcgtcgaatttcgtgtcactgcggaacagttcggcgccgcacgcacggcagcgatatatgcccgcggtagtggtatcggtgtattcaccgacgtggggtggttccgtgccggcgcggcgcagcacgtggaattcctggggggtcagcttctcccgccactgtgcatcggtccattccccggggtccgagatgggatccgggcctgatgtcgcgtcacggtgtgcgtccatggatgcctcctgtttccgggtacacgctagctcggcacccgggatcacccggggcgacggatttgaatccgccgcaggcgcaatcgttggtggtgaaaactgttcggacggcgtcgccgtggtcgcccggtgaacgatacttcccccatgagcgcagtaaatgacacagtcctcgatgaccatcccggctcggtgcgtgccctcctgaggtgtccgcggggtgcggtcgacgtgacgagcttcgatgcagcggccacgcccggctatcccggcaagggaagggcggattcgctggagcagctcgacgcattgcgtccgaccctcgacgatctcgaggaacgcttctatgcgaacagcatccacaccagggggccatcggtgctcctggtgctgcaggggatggatggtgccggcaagggtggcacggtgcgccatgtgatcggcatggtcgacccacagggggtgcacctgcacgccttcaagacgcccaccaaggaggagctcgcccacgacttcctgtggcgcgtgcgcaaggaggtgccgggtgcgggccagatcggcatcttcgaccgctcgcactacgaggatgtgctcatcggacgcgtgaacaagttggccgcccccgacgagatcgagaagcgctatgggcggatcaatgagttcgaggccgagctggcctcccatggcacccgggtgatcaagtgcttcctcaacgtttccaaggatgcccagaagaagcgcttcctggcacgggtcaatgacccggagaagtactacaagttcaacccggccgaccttgagagccgttcccactgggacgagtacatgcaggcctatgaccttgcgctgagccggtgcaacgaggactatgcgccctggtacgtcattccgtgcgaccacaagtggtaccgcaactgggcgatcacccgcctgttgatcgaggagatcgaggcgatgggcctcacgtggccgcccgctgacttcgatgtggagcaggcccgccgtcaggtggaggcgctctaggggccgtcgcgcccttggcatgccgcaaccggaaggcatgcgatcggatgtcatgggaaaggggccgggagaattctcccggcccctttccgtccagactgtgtgccctgaggaggatgcggtgactagatggcgacgagcttgggtgtggccacctcggcgggggcgccatggtccgattcctcggactgcccggtcgtcgagtcgtcctcatcgctgagtgcgggatcatccagcatggccattgcggcgaaggcataacgggccatcaccaggtcgatgatgtggtcatcggcccccaggggtgcgctgacggcgacggcccctgcctcgagcgcctcctcggcgacggccaggtagttgtcatcggccgtcaggaagaaggagcccacggcgatcgcgcgacgcccctgatcccgcaggctcatcatggctgccgccacggaattgcccgagccatcggcgcaggccatggtgatcggcagcttgtggtgcgaggcccattggcgcgccctgcgtgccagcagcgcggcgccgcgcacgtcgccggtgtcgggagtggcgaagaccagggcattgagctccacggcgtgcgatgccgacagggcattgcgcaggcgaaggtcgaggatattcagcaactcggtggaggggcccaccggatgtgccaacgacgcagcaatgtccgggtgcgccttgtggaccgcctcgagcatcttctgcgcggccggcgcgggatccacggcccgggtcagtgccatcggcacgaagacgacttccttacggcccctcgaggcgagcgtggaaaccacctgcggcccgctggggggacagtggtcaaggaatgcgagatgaaccgaaagctccggtcgctgcagttgcatctgcttgcgcagatcgtggaagacctccacgacgcgggggtttgttgcgccctcggccagcaggatcaacaccggtgcagtcatgtgcgtgcccttctctagcgacttacagggcggcgccattgccgtaaaacaagaccaccatctgcctgttggggggctccgcgcaagtcgggtgtccagtatgtgacaccaaaaatcacgacggaaggtcctgggaggcgcctcccacgggcttcagtatgcagtcgggacgcgaaaatgtctcgtgagatggcgtgggcgttacacaaacgttacaaatcgatgatgtgcccagtcctgccagatggacacccccagggaagggcaggtgacaaggggatcgaccggttcgggtggccgggttccggtggccgggcgtcggtggccgggcgcgagcagccgggcatcgctcgcaccgtgaccgggtgcgtggcggcggttcggagtggtctcacgcggtgccctccgcaggcagggctggaagggcgcgcggagcacgcagggccggcgggaggtggtcacgtcgggtcggtgggggcatgcccacaagaagggacgccccgctggcaaggatgggatccgggcgctgcgaggtgcgcgaacgcacgggtgggcgcgcagaggcccacgtggagggctgagcgtgtgcagaaagggatgcgccgagcgcgcgtacaggaatgaggggggagacgacaccccggacaggagccgatcgggtgggcgatactgggttcgaaccagtgacctcttcggtgtgaacgaagcgcgctaccactgcgccaatcgcccgcggcgtcgacaaggctagcgcaccggtgcccgctgccacaatttggcgtctttggcccccgtgtcgggcgtccgcagccccggcgtcgggcatcgggagcgcccgggaacagtgcccgggggcagggatcgcgcgggcgtgcgggcgcgggccgcggccgggaacccatggggtggcgcccggtatcgacccatggcccgatgtgggcgttgcaggtcggtgatcgggtgggtcatgtcatcgcggattcgatcattcacggccccgtgcgcgactgtcggcgtggggccggcaggacggatttgagcgggccgtacggcgggtgggagccctgatttgtcccactcgccccggtccactatggttgtcaacgcgcttcatcgggttcgccccggaaagcatgcggacgtggctcagttggtagagcatcaccttgccaaggtgagggtcgcgggttcgaatcccgtcgtccgctcggagaggctggagccccatccaatggccatgaaccttcgtggtgaggcagctcttcacatggtggagtggccgagaggcgaggcagcggactgcaaatccgtatacacgggttcaaatcccgtctccacctcgggcggctggcgcagcggtagcgcgcttccctgacacggaagaggtcactggttcaaacccagtgtcgcccacaaggcggaaagggccggtcggcaggtgaaaatcctgctggccggccctttccatgtccccggccttttccatgtccgcccctgcccgagccccgacgtgccggtgcagtggggcggtcccgggaaggtacccggtacggatcctcctggtgcgccgaggcgctgtccgggccgaatagccacgccgcgccctgcgtcgcggaaaggcttgcgtggtacgcgggcagatgggcaccagctgcccgcatcgtgcacaatggggcagtcagacattcacgcgcggccaggtttgccgcccgaaaggaagcaacatcgtgtcttcaacgatcaccattgtccacaacgctgagccggagacgaaggtgatcgaggacaccaccaccggcctggacctgttcggcgacgacaagagcatcgtcgccatgcacctgaatggcgagacggtcgatctcgccacccagctttcggccggcgatgtcgtcgagccggtgtccatgaccagtgacgagggcctgtcgatcgtgcgccattcggctgcacatgtcaccgcccaggcgctccaggacatcttcccccaggcgcgactgggcatcgggccgccgatcaccgatggcttctactacgacttccagaccgagccgctcagcgccgatgacctcaagcaggtcgagaagaagatgcaggcgatcatcaagcagcgccagcgtttcgtgcgccgggtcgtcagcgaggaggaggccctgcgcgaggaggccaacgagccctacaagctcgagctgatcgccgacaagggccatcccagtgatgacgacaattcctcggtcgaggtgggcggcaatgagctgaccatgtacgacaatgtgacgcgcaatgggaccgtcgcgtggcgtgacctgtgccgtgggccccacgtgcccaacaccggctacatcaaggccgtggcgctcaccaagaccagtgcggcctattggcgcggcgaccagcacaatgcccagctgcagcgcgtctacggcaccgcctgggccacccgcgatgacctcaaggcctaccagacccggatggccgaggccgccaagcgtgatcaccggaagctggggcaggagctggacctgttcagcttcccggaggagatcggtcccggcctggtcgtcttccaccccaagggcggcatcctgcgccacgagatcgagagctacatcaccaagcgacacatcgatgccggcttcgacctggtggacaccccgatcatctccaagggagacctgttccacacctcgggccacctcccgtactacgccgacacgatgttcccgcccatgacggtggacgaggaggtcgacgccgagggcaatgtgcgccaccagggtcaggagtactacctgaaggccatgaactgccccatgcacaacctgatcttccggagccggggccgttcctaccgcgagcttcccctgcgcttctacgagctcggacgcgacttccgctacgagaagtccggcgtggttcagggcctgacgcgcatgcgcggcttcacccaggacgactcgcacacctattgcacccctgagcaggccggtgacgagatcaagatgctgctcggtttcttcctgagcatcctgcgtgacttcggcctcaaggagttctacctggagctgtcgacccgtgacgcctcctcgtcgaagttcatcggctcggacgaggactgggaggcagccaccgagatcctgcgcgtggcggccgagtcgacgggcctggaactcgtggccgaccccggtggtgcggccttttacggcccgaaggtctcggtgcaggccaaggatgcgttgggacgtacctggcagatgtcgaccgtgcagtacgacttcaaccagccggcccggttcggcctggaatacaccgcggccgatggcagccatcagcagccggtgatgatccactgcgccaagctgggcagtgtcgaacgcttcatcggcgtcctcaccgagcactatgccggggcgttccccgcgtggttgtcgcccgttcaggtcgtcggcattcccgtggcgggcgagttcaacggatatctcgacaccatcgcgacccggctcagggagaagggcgtgcgcgtcgaggtggacgagtccgacgaccggatgcagaagaagatccgcaacgccacccgccagaaggtccccttcatgctcatcgccggcgagaaggaccgtgaggcgcaggcggtcagcttccggttccgcgacggcagccagctcaacggcgtgccgattgacgatgccatcgaccggatcgtcgagcacatcaccagccgcgacaacgccgaccccacctcacctgacggggtgtcggccggtgagtgacaccaaggagtcgtcacaagacccgtcccttgagttcgtcgagcatctggcgggggtacccgattcgttgcagcggctgtggacgccgtaccggatggcgtacatcgagggggagaacaagccggctgattcgctggccggcgacgagtgccccttctgccgtgcaccattgcgtgacgacgagacctcgctcatcgtgcgtcgcggacagaccgcctatgccgtgttgaacctgtacccgtacaacccgggccacctgctcgtctgcccgtaccggcacatcagcggctacgtcgagaccaccgatgccgaatgtgacgagatcgccacgctcaccaagcaggccatcgcggtggtgaagaaggtctcatggccggccggcttcaacatcggcatgaaccagggcacggtggccggggcgggaattgccgcccacctgcaccagcacgtcgtcccccgctggcagggggacgcgaacttcctaccgatcattgcccgcaccaaggcagtgccccagctgttgtctcagacgcgcaccctgttcgcggacgcctgggtggacctctacgggcccacgggggaggaacggcatgcttgagcacctgcgcgcccactggacaaaggtgatgtcgccaccggcgaagctgctgctgcggctccatgtcactcctgacatggtcacctggacgggcaccatcggggtcgtgatcgtcacggtgttgttcttcccccaggggtggctgtggcagggcgcgatcctgctcggcttcctggtggtatcggacagcctcgacgggatcatggcccgcaccagcggccggtccagcgattggggtgctttcctcgacagctgccttgaccggatcgccgatggcgcggtcttcgggggcatcgccctgtactacgtcggcaaggacgcgaacaccgtgtgggcgaccctggcgatcgcggcgctcatcttcggacaggtgaccagctacaccaaggcgcggggtgagtccctgggctacaccgtcaatggcggcctggcgggtcgcgccgaccggctgctggtcgggttgatcggcgtgctgctcaccggcctgggcgtgacgatggcccttccggtctgcctggtcatcctggccgtggccggagccatcacggtgggccagcgcatggtgctggtgcacaaggccaccactgcacgcgcccgggccacagcggacgaggcgcagtgagccgtcaccaccggcattcgaatctgttgccgatgatgcggatcggctcccacctcccggcgtggttctggcgtccggtgggacggctggtcgtggccttcctgaccaccttcccgccccggcacatgcgtcaatggcagctcaactacgccgtgatgaccggtcagcgtccaggctggaacacgacgcgacgcgccttcgggcggtgggtcgagaacatgatgtgctcgctccagctggatcactggagcgagaagaagatccgctcccgggtgatcctggagaaccccgagggttgggctggcgtgcaccgtgcattccaggagggtggcctggttgcggccctgccccacatgggctcatgggaccttgtcggcgccttcgcctgcctggacggactgccggtcagctcggtggccgaggcgctgcccgatggacagttcgagtacttcagatcactgcgggagcgactgggcttccgcatcttctccgtgcgcgatcggggcgtctacaacaagttggccgacgacctggacgagggtcgggtgatctgcctggtcgccgaccgcgacttcagccgccggggactgccggtgcactgggacacccccgacggcccgcgcgaccagacgatgccccccggcccggcattgttggcccaacagggacaccgtccactcgtcggcgtggtcacgtggttcggtccgcgccatcggctgcatgtcctggtcaccgacctcatccacgtcggatccggggaacaggagctggtgagggcctcccagcaacttgctgacttcttctctcgccagatctcggaccatccgcttgactggcttatgctgcaacgattcttcaggggagtgaccgcatgagagtcggactggtatgtccttattcgttcgcccggcccggtggcgtgcagaaccacgtgctggggctcggtggctggctcaaggagcagggccacgatgtgtcgatcatcgcccccgggcaggccagccgcagcctgttggccgagacggggctggtgcccagcgagttcgtcagcgccgggagggcggtgccggtgaccttcaatggctccgtcgcccgcatcaacttcggcgtgggcccggcgctgaaggtgaagaagtggctcgatcagggcaactttgatgtcgtgcacctgcacgagccgatcgcccccaccatctgcctgctggccctctacctgaccgaccgccccgtgacggccaccttccacaccgccaccccggagctcacggcgattcgcttcgcgaaccgggtgctgccgcgcatggtgagccgcattgatgcggcgatcgccgtgtccagcgaggccgccgacgtggcccaccactactcgggggtcaatccggtggtgatcggcaatggaatccacctcgccgactatcccctggtgcgcgcgacttcccggtggcgtggcggcgagcatcccctcatcaccttcctgggacgctacgacgaaccccgcaagggattcgaggtgctcaccgcggcactgccgctggtccgcgccacctatccggacctcgaggtcgtggtgatcggcagcggcacggcgcgttccgtcgagggcgtgcgcttcctgggggggttggacgacgaggaacgcaatgcctggctcggccgctccgacatctacatcgccccccagaccggccgtgagagtttcggcatcgtgctgctggaggcgatggcctgtggggccccggtggtggctgccaacctgagggccttcctggacgtgctgaccgacgatgagggcctggtgggccacaccttccgggtcggcaattccgccagtgcctcgcgggccatgctgcggagcctgtccgagccacgtgacctgcgccttgagcgtggacgcgccctggccgccaactacgactggtcagtgatcggaccgcaggtggttgccatgtacacggtggccggccagaactatgcaacctcacgggggatcaagaatcgcgagctgaagggacactgaggcggcgggaccgtccggacgatgccctaggcttggcgcgtgtcggattcacatgtcgccaagggcggagcgcccgctgcagagcccggccgcacagtgccggatacggtctacgacaccgatgcggtcttcacgatccccaatgtgctgagcttcctgaggttgatcggcgtccccttcttcctggtgctgatcctgacccaccacgatgtctcggcggtcgtcctgctggccgccgccagcgcgacggactggctcgacggccagctggcccgccgcctgcgtcaggtgagccggttgggccagatgctcgatcccgccgccgaccgcctctacatcgccgccaccctggtcggactggccgtgcgcggcatcatcccggtgtggctgctggtgatcctgctggcacgtgacgtcatgatggtcttcctcgtcccgctgctgcgcacacgtggctacacctccctgccggtgaacttcgtcggcaaggcggcaaccttctgcctgctctacgcgcttccactcgtgctcctgggggccggaccctggttcttctcgccggtggcgcgggtcatcggctgggccttcgccctgtggggggccttcctctactggtgggccggcatcctctacgtggagcagacccgcctgctgttggtgagtcgaccctccctcaccagcgcgcatgcccgcagctcgtcgggcgaacggccgtgaggagttcccaccgccccaccggccaccgtcccgggcgcgtcgatgcgtccatggacctcatcgatcagatcacctccacggccctcaaccccgagtatgcgcgcgacgcacagcgtcgggccgcaaccggcggtacggggcggacgaccagtgcaagggtctcgcggggcgccggccacgtggtgacgatcctcatctgcgcgttcgtcggagtcgtgctggccgccgccggcatcaccaccgccaacgcggcccacgaggcctcccacgagaggcaggcgctgatcgatgccatcggcgcagccgaatcgcgcaatgcggaccagcggggccagctcacgcagatccgcgacgacgtcgcggggctgcagcgtcgggccctggccgaccagcccgagatgctggaccgactgaacgcgttgcagctcgccgtgggcgacaccaatgtgcgcggcccgggcatgaccatctccctgaccgacggaccggcagacgaccaggacgcgcaggtggtggacgaggacctgcgggtcatcgtgaacggcttgtggcagtcgggggcggaggcggtgagcatcaacgggcaccggatcaccgcccggaccgccatccacgacgccggctcggccatcaccgtggactaccgttcggtgagttcgccctacacgatcgaggcgatcggtgattcccacgccatgaccggtgccttcgcgtcgacaccggccagctcctggctggcctatctgagggacaaccaccagatccgctacaccacgaacatctcctcgaccctccagctggagggtgatcccgagggctccgccgaccaactccagcgtcgtccctgaccatccacccctgacggaaggacctgaatgctcgcgatcatcggcctggtgatcggcatcatcgtgggactgttcatcacccccaatgtgccggtcggcctccagccctatctgcccatcatgatcgttgccgccctcgacgccctgttcgggggagtcctggcctggctcaagggaacgttcagtgaccgtgtcttcgtcgtgtccttcgtctccaatgtggccgtggccgccctgctggtgtgggtcggtgacctgatcggcgtcggctcccagctgtccaccgccgtgatcgtggtgctgggcatccgcatcttcaccaatgtggccggaatccgtcgcgaggtgctccatgcctagtcatgcggtgcgggagacgcgggcgaacaagttgcgccggttcctgcggcccaccgttgcccagggcgtgctcggtatcgcgttctgcctcgtggccgccgtcggcgtggtgcagatccgctccactgccaccgtcgatccctattcgtccatgcgacgtgcggacctcgtgcagatgctggccggcctcaacgccgagtcgggacgactcgacgagcaaatcaaccagctcaagggcacccgcgatgacctgcgcagcggcgtggactcctcgaatgtggccgccgaccaggcgtcccaacggctcagccagttggagctactggccggcacggtgcccgcccagggacccggaatccggatcaccatcagtgccccggcggggaaggtcaccgcgaacgcgatgctcgacaacatcgaggagttgcgtgatgcgggggcagaggccatcgagatcaatgacagcctgcgggtggtcgcctccacctggttcgccgatggcgacaatgtcctcatcgcgaacggccagcagctgagcctgcccctgacggtcgacgtcatcggggaaccccatgaactggccgaggcctcgcggttccgtggcgggctggtgagccagatggagtcgcagaaggtggggggctcggtgaagatcgacacccccgcacaggtcgagatcgactccacggcgaccgtcacgacgccccgttgggccaagcccgcctgagcccggtccggtaggggtgaaagccgcccggcggtggcacagcgtgccgaccgaatgagagactgaggaaaactgggggaaagcacccagccgagtggaaaggtagccgtcatggaattcccgtcccagctgcagtacagcagcgagcacgagtgggtccgccagggggatggcgcaacggtgcgcgtcggcatcaccgagttcgccaccgagtcgatgggtgacgtcgtgtatgcctcactgcccacggtgggtagtcccgtcacggcgggtgattcatgtggggaattggagtcgacgaagtcggtttccgatatctattccccggtcacgggcctggtcagcgcggtcaacgatgccgtggccagtgcccccgaggtgatcaatgcctccccctatgacgagggctggctcttcgaggtcgagctgggtgaggactccggcctcgacaagctgatggacgcagacgcctacgcggccgtcgctggagagtgacgagcccttccggggtggtcactaaagtggatgtactgcccgggtcccacttccggtggggcccggtcggcgcacggggcggccggccaatggatgtcggtcaaacacgacggcggtcggtcccggtagggtccgtgaaatgagcctgaggaaagagttcgcatcatgatgatttgcggtaagtgcgggcatgagaaccccgacgggagcaatttctgctcacagtgcggttcgcgactcggtagcccctcggatgccacctcggtgattcccatcgtcgaggaggacgttccacacgcggagatctccgccgaggacacggctgcggtcagcgcattgcccgagggaaatgccctcctcatcgtgacgcgtggccccgatgtgggtgcccgctatcttctggaccagccgcagacaacggcaggacgcagcccggactgcgacatctttctggacgacatcaccgtgtcgcgtcaccatgccaagttcacgatgcaggacgggcagatgacgatcaccgacctggggagcctcaatggcacctatgtgaatcgcaccctggtcgatggttccgcagtcctgaggccgggggaagaagttcagatcggcaagttccggatggtcttcttcgtaagtgagcacggactgcactgatggcccaggcgccgctgcgcagcatcggtcaggtgctcaacatcctcaaggcggagtttccggatgtcacgatctcgaagatccgctttcttgagggtgaggggctcgtctcaccggagcgcgccccctccggctaccggaaatactcagagtccgacatcgagcggctgcgctacatcctcagggtgcagcgtgaccaatatctcccgctgaaggtcatccgcgagaaccttgagctgatggatgccggcaaggagcccccgaaggcgaacgacccgcgtccggcagccagcgccggcgagtcggctcccgacccgcaacccgcggcaacccatacggtgcaggccgctcccggcgaccagatggtcggccagcgcggctcacatcccatcaagctgacgcgtcgcgaactcatcaaggcctccggcgtgcccgaggccatgctgatcgagctggaacgtcaacggatggtcgtcacacgtcgcaattcgatctactacgggcgtgaggccctggtgttgtgcgtcgttgcccgcaagttgcaggcctacggcatggacacacggcacctgcgggccatcaagcaggttgccgagcgcgaggccggcatgatcgagcagggggcgcagccctttctgcgcaatgatcccgaggccgggcacacgatcaacgagctcgcgcagctcgtcctggccgcccataccgccctcatgcacgtcgtcctggagcgttgacatggcagaagttgaagtcgtcggaatccgagtgctcgaggacaacgaccaaccggtcatggtgctgcgggtggttggttccacccgctacctgccggtgtgggttgacacggtgtcggctgcggcactgatgtcggtggtgggcggtgaactggaggggcccgccctgacctttgacctgttctcgaagctgctctcacggttgggcgacccggcgctgtccgggcgcatcacgggctgggatgacggcgtgtacagcgccgagctggtcgtggacggcgaaccgatcgcggcccgggtgtccgacatcgcggccctggcattcgtcagggggttcacgatcacctgccccgatgagctggtggctcaactgggcgttgaggctttcgaggaggacaaggacgtcgtcgaggaattcaagagcttcctggaccacgtcgatccggacgattttgagaagtgaaatacctagtcacaccgcaattggtggtggtgactggcccaccggccgcggccggggacacgcacggtccacagtgcgcctcgacgccacgcggccgatgtcgttgcatccgatggggctgggagcttaccgtctgagatgcaccgcgaaggtgtcccaggtctgacgaaagaggcgatcgtgaccaacccagtccccgagggtacgtcggcgcgggacagtgcccaatcggctcttttcgagggtgatttcgggcggatccccgaggacgcaggctttcgcggtccggttgcatgctcggtcaccggcatcagctatcgccaactcgactactgggcacgcacgggcctggtcgtgcccggcatccgtgcggccggcggatcgggaacccaacgcctgtattcattccacgacatcctcctgctgaaggtcgtcaagagcctgcttgatgcgggcatctcgctgcaacagatccgtcaggcgatcaaccacctgcgcgaacgcggggacaacgacatgtcgggcatcacgctgatgagcgacggggtctcggtctacgagtgcacgtcggaggacgaggtctacgacctgctgcgcgggggacagggcatgttcgccatcgccttggacggcgtggtgcgggatatcgaggggaccctcatcgaattgcccagcgagcacgtcaacgatgaggcgcccctggcccggggcgatgacgagttgtcgctggcgcggcgccgtcgtcgcaccagctgagccagcagatcccgacgagccggtcccaaccaagtggcgcaacgccggcccggttcgggatggcgcggccctgtcaacgatggtgccgtgatcgcccacggcgtgttcccgcggccctgtcccgtatggtccatcgcctagacttcatgccatgcaatggggcgcacaaacacagaccgatgccgcaggcgacgacctgacggcccgtttcgaatcccgacacatcgggccgacgcgcaatgatgcgctctcgatgctggagtcgttggggttgcacagccttgaccagctcagcgatcgggccatgccggcgcagatccgcatgaccgactccctgcaactgccaccggctcgcagcgagcaggccacgaccgcgcgcctgtcagagttggcggcgctgaacaatcctcggcgggccatgatcggcatgggctactacggcacggtgaccccctcggtgatccgtcgccatgtggtcgagaatgccggttggtacacggcctacacgccctatcagcccgagatcagccagggccgcctcgaggcactgctgaacttccagacgatggttgccgacctcaccgggcttcccctggccggggcgtcgttgctggatgaggcaacggccgtggcagaggccgccgcgctcgcccatcgcgcgcagcggggcaagggggacaccctggtggtcgatgccggattgctgccccagagcctggcagtcgtgcagacccggatgggggccctcgacatcaagatcgtcgagaccgacgacctggccaccagcccggcgctcgatgaggccttcgcggtcatcgtgcagacccccaccaccgatgggcgcatgcaatccaccggggaactgaccgaattggccgatgccgcccatgccaagggcgtcatggtgatcgctgccgcagacctgctggcactcaccatggcagtgcccccgggacagtggggcgccgatgtggtggtcggcaccacgcaacggttcggggttccgctgtactacggcggtccacatgccggctacatctccgtacgcaagggcctcgagcggcagctgccgggacgcctggtcggggtctcacgggatgccgatggcgtggtggcctaccgcctggcactgcagacccgtgagcagcacattcgtcgtgagcgggccaccagcaacatctgcaccgcccaggtactcctggcggtggtggccgccatgtacgcggtataccacggaccctccgggttgcgcaggatcgcccacgacatccaccagcgcacccgcctgttggccggggcactgtcggcaggtggcgtgaaggcacgccatgagtccttcttcgacaccctgaccgtcgccgcgccgggcaaggccgccgatgtggtcgccagggcccgcgagctcggcgtgcacctgcgcctggtcgacgggaacacggtcggcatcagcgtgggggaggatgccaccgatgaggacctcaaccatgtggtggcggccttcggcatcaacccggacacgcaggcggatccctggggtgggttcggggcgacgttgcgcaccgattcctacctgggccaccgtgtgttcaacagctatcactccgagacgcagctgatgcgctacctgcgcaccctggaggaccgcgactttgcgctggaccggggcatgatcccgcttggttcgtgcacgatgaagttgaatccggccacggccatggagcccatcagctatcccggcttcgcaaacctgcatccgttcgcaccggccgaggacgcacgcggctaccgcatcctgatcgacgagctgtccgattggttggtgcaggtgagcggttatgcggcctgcagcctccagccgaactccggggcctccggcgagttcaccggattgctggccatccgcgcctatcacgagtcacgcgccgaccacgaccgcaaggtctgcctgatcccctcatcggcgcatggcaccaatgccgcctcggcggcgatggccgggctgaaggtcgtgaccgtccactcggcccacgatggccaggtggacctggcggacctggcgacgaagatcgccgagaaccccggcaggatcgccgcgatcatggtcacctacccgagcacccacggtgtcttcgaggacaccatcacgcgcctgtgcgagatggtgcatgaggctggcgggcaggtctacattgacggggccaacatgaatgcgctggtgggtctggcccggcccggccgcttcggcggtgacgtgacccacctcaacctgcacaagaccttcgcgatcccgcacggtggtggcggtccgggcgtcggtccgatcgtggtggccgaccacttggtcgagttcctgccgaaccacccggtcgtcccgatgcccgacgcgcgcatcggtgccggcggaacggtgtcagccgccccctggggttcggcgggcgtgctcgccatcagctatgcctacatcgcgatgatggggcccgacgggctcaccaaggccacccagatggcgttgctcaatgccaactacatcgcccaccgactgtcggactactatccggtgctctacaccggcgccaacgacctggtcgcccacgagtgcatcctcgatctgcgggaattgtccgcctcgacgggcgtcagcgtcgacgatgtggccaagaggctgatcgactacgggttccatgcgcccacgatgagcttccccgtgccggggaccctcatggtcgagcccaccgagagcgaggacctgggcgagttggaccgcttctgcgatgccatgatcgccattcgcgccgagatggacaaggtcgcctcgggtgcctggccggtggacgacaatcccttggtgaacgctccgcatcccgtgagcaggatcggcgccgacgagtggtcacatccctatccgcgcagcgtcgcggccttcccggcgggacatcacacgggacccatcgagggggagggttcggacaagtactggccggcggtggcgcgcatcgacaacgccttcggtgaccggcacctgttgtgcgttgcccccaccgacgagctgctggcccagcaacagtaggagggacgtgggctaccgtggtcagggtgcgcacagtgaccacggtggccgacgatgggcccgcaacccgtgaccgcggcggcaatctggcgaccgcggtcagcagacgtgtcacgaaggtcctgcagtgggctgcccacacgccgtgggcggcccacctgtggagggccaatgatcgctacaacaatcgcctggggaaccagttcgcggggggcatcacctatttcagtgtcctcgcctccgtcccggtgctcatgttcgccttcagtggcctgggcctcaccctgacggtcatccgtcccgccctgctcgatgatgtcaagggcatcgtggtggccaacctgtatcccggcccgatgcgcgacaccgtgctgcaatacctggagcagtacctctaccactggcagacggtcggactgatcgccatcgtcgtggcgttgtgggcgggcgccgggtggatgggcaatgtgaagagcgccatccgggccatgtggcgtcccgagttcgacatgaccgaggacaagcacttcttcttcgtcgaggtcgccgtcaatgcgctgctgctgttgggcctcatcgtgctggtgggagtgctgctcgcggccaacaccgtgttcaccggatggggcagcgagctgttgggcctggcccacctcggcgaattgaggatctcggccggactgttgcggctcatctcgttgtcggcgtccctgctgggtggctgggcgctgttcatctgcatgttccgggtgctgccgcagacccattcgtcgtggcggtcggtgttgcgcggctcggcggttgccgccgtgctgttctgggtgatgcaggccgttgccacccaactcgccggggtcttcgcccgcaaccgcagcgccgcgctgtggggagcgaccctgatcgtcggattgctgttcctgaacctgttcgcgcggttgttgctgtatgtcgcggcgtggatcgccaccgccaaccaacctgccgtggcccgtcggtggagtgactttgaccagttgcttcgcgaacgcgacgacacgatcgcggtgcccgaccactgggccgccgccgaccaggaccatgccgaacgcagcgcggaggaaaccgacgaggccaccgcgtcgcgacgggcagccgcccgagccgttgacgtggtcgtcggaagcgtcatgtcggggctgggcgggcctccgaccgatgtggccggggctgcaccgctgctcagtcccggcggggcgcgtacggccatgcccccggccccggcgacggagccgacggtcgccaaggattccgtgctcgtgtcagccggccgctccctgcgacgtcccgaatcaacgcgggccagttggggcgcctggctgctcggggtcgtgacggggctcggggcaggggccggtctggtgcgccgcggactgcgccgcaccggacgtgatgggcgcggtcagcgcggacgtaccgagaaggcgtaatcggccgtgctggtggatgtcaccatcggcggatggaggtccgtgatgcggaagcgccgcctgcgggagaccatcagcacgatgcatccaaggcacaccaccgtgatcgccaccaggatggcgagcgctccccagtaggtgctgttgagcccacccgagatcaccacccggaaggcatcgacggagtatttcatcggtgagatgacggcgagcttctggtagatcggcggcagcaacagcgcggggaaggtgccaccgcaggccggtagttgaaggatcagcagaatgaggtacacggccgtctgcggggagccgaacaccagcctgagcagataggccggcgccatgaaggccaaggccgtgacgaccagcaggagcaggaacttccatggatggaccgggttgagtcccagggtgacccagacggtgagccccatcaacagggatgccgccagggcgacggttgccaccggaccgaagcccagcatggtgatccgcagcggactcgcgcggccggtcagggcccgcccggatatggtgcggaccaccaggaagatcgagacgccggcgatccacagggcaatagagaagaacatgggggcaagcccacgtccgtaggctccggccgggttgtcgacggtctgggtaaccgtggccggtgacgccatcacctctgccatggtgttgcgctggtcctccgacagggtcgggagctggtcggtgcccttctgcagtccggaggccaatgtcgcagcgccattcgacaattgcggcatggccgtgtcaaggcgccccaggccgtcgctgagctggttgaggcccgagacggcgccggctccggccgacagcagggtgtgcccggacgaggtcgcctgtcccatggccgagttgagttgcttgacgcccttgtcggaggtgtcgagggcgccattcagctggtcgagtccgtggtcaacctgggtggcggtgtcgccggcgcggtccagggcgttggtcaatgtcgtaccggccatcgcgaggttgtccttgttgaggttcaggttcagccccgcagtcagctgcccggccaccgccaggttgctggtcactgaggtgttcgccgtgtcggccccgcccaattgtgccagcagggacacatagtcgggatcggttgcgagttcgggatggttggccagcaacgaggcggcggactgcttggccccggccagatcggactgcacgctgatcaccgagttcccgttcgggttctgcaatgaccccgtgatcgacacgagatgggtggcatcctgctgtagttggggcagttgcttgtcgacgaagtcgttgaccgcccctgacgcatccttggcccccgccacgtcattgccgagctgcttgccggaggcgatgatggtggccgcacccgcccgtgcctgcccggcggcctggctgagcgtcagggcggacgccgagctgtcatccagtgcgccgttcagcgaatccagggcaggtttcagccccgaggtgtcagagactgcggcggccacctgatccttcatctggtggaccccgtcggccgcctgtgacaggccactgtcgagggtcgccgccccctgtgcggcggtgttgaggctcgacttgatggtgttcaggttgacgaacagcgactggaaataggtctgcgacacgctctggtcgagcgtcttggccagggtgtcgtccatcttcgaggtgagcaggccgatgatgtagccgttcgcgtcatcgcgttccagcgagagggttgcgcgcgcgggcttgtagtcgccggcacccaccagcctggtggagaagtcctgcggcacggtgagcaccgcgtagtaatcgcccttgtgcaggccacgctcggccttcgccccatcggtgcccaggaactgccagccgaaggtgggattgtcacgcagcgcctgctcgaagtcccgcccgccgctgaccgtcttatcggcgaagctggccggctggtcgtggttcaccacagcgatcttcacgcgatcgaggtggttgtacaggtcccagttggcgtgcaagtaaaccccgccgtacagcagcgggatgatcaggatgaagaacagcgccaggcgcgagcgtcccttgaagcgacggaactcgaactggatgagctgcccgaagggcacgaaaagatctgatttcttccacgacatggcgtcacttgtccgggttgggtgtctgggtgggggagggggcggcgacctgatcgtcgcccatggccgctccggcaggccgcccgcgggcggtgaggggagccagggcggcctgcgccaggctgatcgggacgggctcggagccgagtggttccacgacctggggacggtcgctgcgcaggctcaggctgatggcagtggctgggatcaggtcatcatcgacgactgaggcgacgatcacggagtcatccagggtggtcaggcgctcgaggagggcgaacaggagcgactgctgggaatggggcacggtcatatcggcatcgtcgatcaccaccacccgggagggccggatcatggccagcgccactgaggagattgccttctcgatgggcgtgagcgattccagctccacatgcttctcgatgcggaagccaacggtttcctccatcgcggccacccggtcggctgccaagcgacgcgggaatccgtccaggaagcagcgctcggtgatcgactcggccaaggtgagcctgtcctcggggcgtacatagtcgcccaattgggcgacgctggtcatctgcatcgcctcaagcgggtcatggatcgcgtcgacgccgtcgatggtcaacagccccgacaggggacggaaccggcccgtcagggccagcagcagcgcggacttgcccgagccgagcggcccatgaaccatgcacagctgtcgggcgtggacatcaaggtcgatgggcccgaagatccgaccctggcgtccgctggactccagttcgcgggcatgcagcaccacgcgctcgtcactcatgcggaaagtccccccaggactgaggcgagaaccgaccggatggcggccggggtgaccatgtgcggtgccgccgcatgctccagcgccaggaggctgatcaactcgaacacggtccagattgcctcacgggtgcgctgggggcccagtcttcgggccagtgggtggccgtccagcagccgcatggcctgttccgtgcgctcccggagcaacgtcgcatagctttctgccacctgcgggtcgtggacggccagttgccggaactcgcccagggccacctgccaggggccggattcgatgacgatctgcgcgaagctgtccgcaatgcggtcgatggccgaggcatcccgggcaccgttggcgaacatggcgtcgagctcggcgatcaccggcgggctgaggcggttgatgttctcgatgcagacggtggagaacagctccggcttggattcgaagttggagtagaccgcgcccttggtgaagccggctgattcggcgatctgggtcatgctggctcgggcatagccgtgcgtgcggaatgcccggcttcctgcccggcgtcgatcaccttgcggcgtacctgttggcgtgtcggacgatgcgccacgtggaggggcacagcgagacctccctgagaggaaaacgttcgataccggcggtatcgagatgtccacggtacaacgcccggcggggatcccgtgagcgcggcggctcaggcgaacaatgccagggtcaacaaataggccaggccgctcatctcgaccagggacccgaaggtgtcgccggtcagtcctccgagccgcgccaggatatggcggcgccacgccacgccgaagacccagctggccaggcaggcacacaccgccacgagggcggcccgccagccgaagagcagccatccactgcccgcggcgatcaccgcggcgatcactgaggcgaccacgatcgtcgccgggtgcgtctttccggcgaagagcgctccgaaccccttcttgtgggcgctcggaatccatcgtccggtggcggacagggcgctgacgcgcgccaccatgggcattgtcaccagcagccagacgccacgccagccatcaaggtgtcctgaaccgcctgccgcgatctccaacgccagcacgaggatgatggcggtgacgcccatgggcccgatgtctgattggcgcatgatggtcagggcctcgtgggccggcttgcgggagcccaggccgtcggcggtgtcggcgagtccgtcgaggtgcaggaagccggtgcacagggccaggattgccaggcctgctgcgattgccagcggctggccgccccccgcgacggtgacgatggcgcagccgagtccggcgatcaggcccagtccgaggccgacccacggcatcgaggcgatcgcccgcacggcgagtcgctcatccacctcggccaccacgggtgcgggcagcaccgtgaacagtccccaggcagccagcagtccattgcgggtggccacgtcagatcgcgtccttcggttgggggtccgtgccggcgccatgagggcctcccggtcgcggtggcaggctcagcgcccgtccggcgacgcacagcagtacctcgtcgcaggcgtccgcgacgctggcgttgaggattcccagccagtcacggaaggtgcgccctgcctgcgtggcgggcaccacgccggaaccgacctcgttggtgaccagcaccacgcggcgcggggagccggcgaccgcagtggccaactcatcgatgcggtgctgcagctcggggcgggcctgctccgggtgctgccaggcgtcggtgacgtccagctcgcgggtgagccacacgcccaggcaatcgaccagggcgggggagccgtcgtcggacagcacctgcgccacgtcaagggtctccacggtgttccagctcttcgggcggcgcgcgacgtgggcggcgatgcgggccatccactcggggtcgtcagggttgcgttgcgaggtggcgatgtagtcgacgtggtcgaacgaccccagcagcgcctcggcatagctggacttcccgctccgggcgcccccggtgacgagggttcgtgccggacgttgccgggcaccgaggcctgacagctgatcgagcagccttcgggactcgggactgtcaggaacgtccacgacgatgcgggtcatctgatgtctccttgtggtggtcgcatggggtgctgcgctgtgtccagtgcgtcgatggtgcgggccagggcagcgacgaacgcgtcgctgatgtccgggtggcgaaccgcgagccgcaaccagcccgcgcccaggccggggaagctctcgccgctgcgcacggtgaagccgagcgtccgcaatcccgcacgaagcccaccgggcgggtgggcgcgcaggtcgaccaggacgaagggggccctggcctccccgacggtctggatgccgatcccggccaggcgggccaccaggtgtcggcggtcctgcgccgcctgtcgggcatctgaggtggcctgctccacggcgcgtggcgtggagcattcgcgggcggtgaccagggcgggggtggagatgggccaacagggctgttcgtgcgccaggacgcgaatgagcgcgggatccccgaccacatatccgatccgcagccccgggacgctccaagtcttcgtgaacgagcgggtgaccaacaggccatccatgcgtgccccgatgaggctctcgggctcgcctggcacggcgtccatgaatgcctcgtcaaccaccaccacgcgtccgggccggcacaacgcgcgcaggctcgccgccgaatgcagcacgccggtgggattggtcggattgccgatgaccaccatgtcggccctggggtccagcagttcgtgatcgaactggaagccatccgaggcatggagcaccaggcggccgaccgggcgcccggcgttgcgcagggccacctctggttcggtgaactggggatgcaccacgaccgcccagcgcggggagaacccgtgggcgatcaggctgaacgcctccgaggacccggccgtgagcagtacctggtcggggttgacgccatggcgcagtgccaccgcacgggtcgcttcgcgctgatcggggtagtgggcccactggtcgctggaggcgacgatgcgctccacgagccaggccggaggtcgcacatcgcgcacgttcaccgccaagtcgaccaggccgggcagcacatcgcgatccccgtgatgggtgaggtcgggcgctgcggacaacgcatctcccggcgtcgtggcggcaggccggggggagtgatggccggtgtgcccatattcgctcgccgcccgggcgaagcgttgcgccagtaccggactccctgcccagtgcaggtgctggtaggaggcgtggacgctgggcgcggaaccgggggtcggggcgaccagcaccccctcgggtcggttgccccccgtcggggtctccacgtcccacgccaaccgttggtcgcccagccgttgtggtccggggtcgcggtcgtaggggggcgtgtccagggtggtgcggtggaactcatgggcccgatagcgctccccggcgcgcatcaggaagctgtcgttggcggcgcgggcgtggtggtagccgatggtcaggcgcggcgtcatggacgagtcggcgtcgaccaccccggccatcgccagtccatccaggctgcggcacaggtagagcagccccgcacactcggccaccgtcggcaggccctcggacacgcgtgaggcgatttcagcgcccagggaggtgttgccggcgagcgcctcggcgtgctcctcggggaaaccaccccccaggtacaggccggacacatcggccggaaggccccgggcggtgagcggatcgaaggccgtcacccggcagccggccgcctccagcagttctgcggtttcggtgtaccggaaggtgaatgcgggacccgaggccatggcgatgaccggacgccccggtaccggttcgacctctgcggcgggatcccagggatcgacggccaggtcaggggccccaccggcgatcgtggcgatggcgtcgaggtcgaggtgtgcggcgacgagctcaccggcctgctgcacgatgccgatcgcgtcaccctgctcgtcggccgtgaccagtcccaggtggcgtgagcccacggccacccgcgtgcttttcggcagagcccccagcaccggcaggccgacacgtgcgcagccccgggtgatctcgtcgaccacgcgggcacccatcacccgattgaggatgacgccggccacatggatgcggggatcgtagctggccaggccatggcacagggctgcggcggtacgggcactgtgtgagccgtcgaccacgagcagcacgggggcatcgagcagcctggcgatatgggccgatgagccaaaaccggcggggtcatcggtgccgtcgggccacgcgccgagcttgccgtcgaacatgcccatcacgccttcgacgaccgagatgtccgcgggttcgggatgcagcgcgccatgggcgaacaacggcgcaatgcgctcgggcccgcacaaatagggatccaggttgcggccggggcgaccgcaggccagtgcgtgatagcccggatcgatgtagtcggggcccaccttgaatccggccacgctgcgccccgaggcccgcagggccgccatcaggccgatggccacggtggtctttccctggctggacgcgggggccgcgatgagcacccgcggaagagccgtcgccgtcaccattcgatacccgcctgtcctcgttctcccttgccaaagggatgtttgacgttgtccatggacgtgacgatgtcggcgatcccgatgattccggcggggcagttgcgtccggtgatcaccacatgttgcgtgccgggacgatgtgccaggtcgtcagcgacctcgtcgacatccagccatcccttgttgagcacatgggcgaattcgtcgaggatgtagagccggtgggtctgtgcggcgagcagggtgcgcacgtgggcccagcccgcggccgccatggctgcctggtcggtgccctcggtcgccctcagccacgaccagccggatccgagtgattgccattccaccggtccgccgactccggtcgtccgatgggcctggtcgagctgtgcataggcctgctgctcgccggtgtgccaacgtcccgacttgatgaactggaagaccccgatcgaccagccctgcgcccaggcccgcagtcccatgccgaatgcggcggtggacttgcccttgccgttcccggtgttcacgatcagtcgggggcggtggcgcagttcggcggtggtcggctcggtgcgctgcggcgcggatccgctcatcgggccagtcccgtcatggcgagcatcgcgtcgacgtcgacatattcggccatggccgtcgacagcgtccggatcatcgtggcgcgcagctgccggtatcccggccgggcgtcgtccggctcccaggtagacccggtgttgcgggcgaccatgtgcaggaaacgccgccggaagccgtcattctccagactgccgtgcagcatcgtgccgaacgaattcccgctgcggacgccgtccaagaaggcctcgccgccgtccacctcgaaacggccgtggtggatctcatagccatccacggcgagttcatcgaagtgatactgcgcggtgcgaacgaccttctcggcgtcgaagcggaagcgggcgggcagcactcccagtccgggcactgatcccgcgctcgactcaatatcgtcgtcgatggtgttggccatcatctcgaagccgccacagattcccaggatcggcttgtcctcgcggcgacgctggacgatcgcctgcgcgatgccgcgtttgcgcagccagtccaggtcatcgacggtcgcgcggctgccgggcagcaccaccaggtcggcacgcgcgcaggtggcgggatcggcggtcacctgcacttcgacgccgggctcggtcgccagggcgtcaatgtcggttgagttcgagatccggggcagccgcacggcggcgaccaccagccggtccccggcgccgctctgggcgggccaccggtccacctgcagggcgtcctcgccatcgaaccagacgtcctccaaccagggcatcacgcccaggttcgccagtccggtgcgcgtggtgatctcctgcagtccgggctccaggagtgccccgtcgccacggaacttgttgatgatgtagcccttcaggagcgcgcggtcctcggcctccagcagcgcccacgtgccgtagaggctggccaggaccccgccacgatcgatgtccccgatgatcaccgtgggcagcccgaagtgacgggccaggcccatgttgacgtagtcgcccgcccgcaggttgatctccgccggcgagccggcgccctcgcagacgatgagctcgtggcgcgaggccaggtcggagtaggcgtcgtaggccgcctcggcgaggtgcttgcgcccggtggcgtactccccggcgtcgagctccccgtcgggacggcccatcagcacgatgaagctgcgccgatccgtgcccggcttgaggagcacgggattcatggcggcctcgggggtgacgccggcggcggtcgcctgcaggtactgtgcgcgtccgatctcggcgccgtcggggcagaccatcgaattgttcgacatgttctgggacttgaacggcgcgacatcgatgccgcgctggcgaagtgcgccgcacaggcccgtgacgagtgctgacttcccggcgtcggagctggtgccggtgagcaggattccggtcatcgggatgcctttcgtgatggcgaatgtgtcggggccttgcgtgctgacgaatgtgcgcggatgagctgcccgattcccaggcaggccccggccgccagggccgtggctgcggcggtgaccacgcggaccagtcgggcaccgtcgcgcacctgcccggcacggggccggtggccgtcgcccagcagcccacggtgctcgacccttcccccggggtagacattgcgtccccccaattggacgccgagtgcgccggcccaggcggattcgcaccatccgccattggggcttggatggttgcgggcgtcacgggcgacgatgcgagcggtggtgacgaccctcccgcccacggagggtgcgcagatcgcacccaggatgccggtgaggcgtgccgggatccagtcaagcccgtcgtccaggcgggctgcgcacttgccgaagtgctcgaagtgctcgttgtggtgtccgaccatcgcgtccagggtgttcgacgcgcgatggatcagcatgccgggaatgcccgcgaccgatccccaccacagggatgccacgcccgagtcggccgtgttctctgccagggactcgatggttccgcgggccaactcctgttccggcatggtgtcggggatgcgtccgcacaggtggggcaaccggtcccgggcggcggacaggtcgtcgccttccagctcgtcggccatctgctcgccctcggtggccagcgactgtgagccgatcaccaaccatcctgcggccgcggttgctgtcgcatgggccagcggatggcggcgggtcgcggcctccacggcaacgccgagggtggcgaccggcaggagggccaccacgagataggccgcgccctgaccgacagagtcgcgccacatcttcttctccagccagcccgcccatgtgccaaaccaggccacgggatgccagggattcgccggatcggggatgagccgatccgccgtcacagcactgatcaggccgacggcacggctgccccagccgtggtcgtccgcggctaggctcaccgcatgcttgatcgcggcatcgatttcgccctggtgcgccatggggagtccaccgggaacattggtggacgcgtgctggggcacgaactgggtcccgagctcaccaccctgggccggacgcaggcccgcggcgcggcccatggcctgacccggtggcatgccgacatgttgtggagcagcgacatggttcgcgcccgaagcaccgcccaggaaattgcccggaccacccgcctgccgctgaactgcacggccctgctgcgtgagcaggaccacggcgcgatggatgggctgccagtgggcgatcttgtggcgcagccgacgcccgccggtcgcgagatcaccgaggtccggtggggtggcggggagagcatcgccgatgtctatgcgcgcctgcggctcttcgtcatgatggtggcggcgcgtggtgcccggcgcgtggtcgtcgtcggacacggcgacatggcctgtgccttcacgtcgatgctcgccgggctgggacatcgggacgtcgcttgggaccgccttgcccatgggcaggtgcgttacctgggttgggacggcagggcgctgctgccctcgtgagcctgtgggctcggacaagaacctcaaatccacgggccgtccttcgcggtgcacgcgcaggcagctcgtggggctgaccttgcgccggggcaatgtggggacacgtccacagtcgaccggactcggggccgggccccatcaccgttgcgggacagtgccggattcccaccggcttcgctgcggacgcgcgctggccgaggccagcacattgaccctagtacaccgggtcaatgccgaggcgggcggttgttctgcggctcacacgggccgttccgtgcccagatcggtcaggaagctgttggcccacgcgtcgatgtcatggcggaagacttgcttgcgcatggagcgcatgcggcgcacatggttcgcatgggtgtcgccggcggcgcgcaacagctggttcttcatgccgttgaggtcgtagggattgaccatgtaggcctgtttcagctccagtgaggcgcccgcgaattcgctgagcaccagggcaccggcgtccgagtcgtgggaggccacgtactccttcgccaccaggttcatgccatcgcgcagcggggtcaccaccatcacatcggcggcccggtacatcgcggccagggccatcttggggtagctggcgtggcggtactcgatgggggagcgcccgatgcgcccgacggacgagttgatgcgtccgaccatctcatcgatgatgctgcgcaacacctggtagcgcgccacgccctcgcgggtcggggtggcgatctgcaggtagacattgcgcatcgggtcgagttgcccggaggtgaacaactcgccgaaggcccgcacgcgatgacgcaggcccttggtgtagtcgaggcggtcgacgcccaggaagatcttgtcgggattgcccaggtcctcgcggagctgctcggcctcggccctcgcctgtggcgtgcgcgacaggtcgaggatctcctgcgcgtcaatggagatgggataggcccgcgccaggatcactcggccgtcgggggagaagatgcggtcgccctgggtgcgcatgccggccaggcgacggaccaggtgcgcgaaattgcgggccgacccggggtcctggaaaccgatctggtcggagccgagcagtccactgatcacctggtagcgccatggcagttgcatgaacagctccgagggcggaaagggaatgtgcaggaagaacccgatcttcaggtcggggcgcatttgacgcaggagcgcaggcacattctgcaattggtagtcttggacccacacagtggcgccgggtgcggcgacctccgccgcagcggtggcgaaccgttggttcacctccatatagctgtcccaccattcacggtggtattcagggtgctcgacgcagtcgtggtagagcggccagaaggtggcgttcgacatgccctcgtagtactcattgaattcctgggccgacaggtccacgggcatgatgccatagccgtcgaaggtgaagggctcgatatgttcgtcggccgagccgacccagccgacccaggtgccaccatggtccttcatcacggggatgagggccgtcaccaggccgccgggagacagggcccagcccgaggagtcgtcatcattctgtacgcgatccaccggaagcctgttggccaccacgacaaactgtgatgtgccggctgcaggggcatcgcgcggtacgggatcttcggtacgtccatcgttggcgggcgcactggggatggatagttgatcctcactcacgacacagacctcctcggctgttctcttggtctgaggctaccaatccgtgcgcccacgaattctgcgacggcgggctgcgcagggctcccggggatttctcccggagcgtccggcggctcgcgtgacaccggttggggcagtgttctggcacagtggatggcatgacgagcggatcagatctggtcagttttcccaccgacgagggcagggcgacgaccgaggcgataatcgatgatcccagtaacgcattgatctgcctcgactttgacggcaccctggcaccgatcgtcgctgacccacaggatgccaggcctgatcctgaggcgatggcggcgctggaacgactgctcacccgggtgggtcgggtggcgatcgtgaccggtcggccggtcgatgtggcgctccaactgggcggcttcgcgatgcttccggacaccagtcgacttcgtgtattcggccagtacggagcggagacctggaacggcgcgaccgggcatatccacgtgcccgcgcaaccgccggccatcggcgaggcgaaactgcagatcgaacgcatgttggccgacctgtcggcgcagaatccggcactgcggggaaccgcgatcgaggacaaggggctggcgattggcgtgcacacacgccgcgcagccgatcccgccgaggcgctggtggaactgaccccccggctggacacccttgccgaccggctgggcctgatcaccgaaccgggtcgcaatgtggtggagctgcgcgccggtcacagcgacaagggtgatgtggtggccaagctgttggacgatccctcgatcggcgcggctgccttctgcggcgacgacctgggtgacatctccgcgttcgccgtgctcatcaagtggcggcgtcgcaccggacggcgtgcggcctgcgtggtgtccgcctcggatgaggtgcccagcctgcgcgaacgcgccgatgtgctgtgtgaaggaccctccggcattgcggcctggctcacctccctcaccagcaccggcagttgagccgggcgttccgatgcggcggggctgatacagatctggcgacgggccgattcgcgtcgatagagtagcccagccggggcgttagctcagcaggtcagagcaggggactcataatccctgggtcgtgggttcgagccccacacgccccactgcaaaacacgtagtcagagcgtgattcgagcgactggccaagtgctggggtagcagaagggtggcttacggggtagcaagtcgttccgagcacttacacatgcaaagagccgccgaccgaaatggccagcggctctttccatgggggcgcccaccagcgcctactcccagttcaggatcggccggttgttgatgtcacggaacgatccggtggcgatcatgatgatgtcgacgatccacccgatgccaaggcatcctgccgtgagcaaccagacgattccggtgccgaccttgcccgcatagaaccgatggacaccgagccctcccaggaatatgcgcagcagcagggccgccgtgcggttcttgtcactgacgggcggctgtccgaaggcctgttggtagccgggctggccctgcgccggcgtctgggcgcctcctgctgtggagggtcactgggcacctgccggagagcccacggcgacgagatgggcgggaactgcggctcgcactgtcgccggtggacgttggcattgatccatcctggatcaatatcgggaccctgggcgagatccagaacgacatccgccgttggccgaccgccggtcaccagcgcccgacgggccgcaccggcgtgtgcaggctcgccaccgtgtgacatcgggactgtccgtccagcaggtgggccagctcgtcggcgtggttctcctcgccgatcacctgcgtggagcgtccccgggggcaggaccaccgttcgccgggcaggagctcgggaggaaggagcaggccgtgttcgggcaggcaggcgcgcacctcgattcgggtgctgaagaaatcgcggtttccccgcgcctgtgaccgggtccggtcacaggcgcggctgaccggctccgctccacctgcttgctgctcgctggcagctgtcccggcccgccgtcaggctgcagtgagcgtcgccagcgccaattcgcgcaggccgccggcacgaagtccgggccaaccgtgcacccggtcaacccagtccccggggattctggacgctccgtaggcggctccgagcagtccaccagcgatggcggccacggtgtcggtgtcattgccgatggagaccgcctcctgcagggctgcggcgatgtgttgcgtcccgtcgaggtgtgcggtggcgtggatcgatgcccaggccgcctggaaggcgctcactgtgtagccgttcggggtgaagctggacggcggtccgtcctccgcggatgcgatctggcgttgccaccacgatcgccgctcgggggcgagctgtgggagtccgctgcgaacgtccagattgccggtgaggacggcgttgcgcacggccaacgaccacagcacggatgactcgatgcagcgcggttcgccgtgtgtcagcgcgcaaacccgcgcggccgcgcgggcggtctcctcggtggagtccacggcggccagccccacgacggatgtcctcatgagtccgccgttgccggcctggccccgccgcccgaagtcgcgagcgatggccgtcatcgcctcgccgaggtcgacgccgtcatggcgggacgccatctcgaggacggttgcggtctgattgccgatgtccgacgctgcgttgtgcttccaatcgatgaacgctgcggcgacggcatccagtgcatccgaccgcgtgaggcgagtgccggacgccgcgacgcgcgcaacgcagactgccatctgggtgtcgtcggaccattcaccgggttcatagggccccaggccaccacccaccacccgcgcatcacccgcgcgaatcggggatgcgaactcgtagggcacgcccagggcgtcgcccactgcctggcccaccagaacaccggctgcgcggtccctgacctgcggtgagaactccatgcgtcaggccttcccgccgaggccaacaagctccgggccacgcgcggccggggttgacggccggagcccgtcaggccgggggacacagctgcttcgcgaacgattcatggtccccacagttccggccctcccagttgaacctcggcgcgggcggcggccgggtcaatgctgatgcgcaggacatcacccggtttggcgtccaacgagcgcaagatggggagccacccccagctgaagaagtgtgatgcgccgaatttcgccctaccgagcgattccgacgcccgcacgatgtccagcgcactgccggcgacgagacgatggacctcgggcgcaaacgacaggacgcccgttgcgaggcatgatgtggtcacgtccatggtctggatggcgccgccggggatgagtgaggaactcttcctgtgcggctccgcctccgagcgggcccgggcggcccggcgaattcgctccactgcctgcatatcgggttcactgccgcgaagcccccagacgttctgggcgaacttctgcatccactccgcgtaggtggtccatacggtcgatgtgcccggggcgattccggcttctcggcacgcctcgcgcagcgagtggcggtccatcacctgataggggggagctcttcaggatgtcgatcatcgtcgccgtgaccccaccgaggacctcgtggtagtcgaggggctcgagcgctctgacctggtccccatcgacgtcgaatcccggatggttcccgaagaaggcccgcatcgcctccactggcggaaggagctcgaggcggcggaacttccacaggcgctgcgcaccctcgtgaatggaggtgatcgtttggggcgaattgactgacaggatcgatcgggcggtgttcacaagccgattggcatgggggccctggtcatccttgtggacccacagccaatcgccgaaccaccgcaccgtgggttcggctcgcaggatgcgctgcactgctgcgggatcgggcgactcggacggggtcgtgagggcgtggcagattgtcgtgatcgtggtcatcccgaaggaactggtctgtcggttggccatgggcagcgatttcgtgacctgcatctgcgttcccctgacgagccatccgtccacggcgaccaggtcgtcaccgatgagctccccggccgaagtgcccgtgagcttgaggagattgaggaatccctcgccggtcagggtcgggcgggacagtcccaggggcgccagatatctgccaacaggttctgccgccggtgagtactgcgcaatcgtcagggcaatcatcccgagttgcgcgcgcagcattctctgaagggcgggcgtgatccgggccatgacttgtcggattcgctcgcgtgaaacccccaggagatcgcctgcttggttgagcgttgccacggcgcctcgtgttccggcgcgtgaagcgattgcggccagccacaggtcggtggggtccttgccgaacgatgagcggtaggccgcggcaaggagttcttcgaactcatcttcgagcgtgtgcgcatccatgtgggcgattccttgtgtgggattttctcagctgcgggggacagcctcggctccggaaacaccgtgatgtcggagctggtgtcgaccctaatggccggcacccacacaattcggaactcggtaactcaggatgacttccagcgggcgagcccggacaggggaacccgtcgaagaccccatcccacggcgccttggagctgcgccgggggctaaccctccccggatacctggacgtattccacgatgttcccatcgggatggcgcgcaacctatcggggaccattgggtccctcggcgggaccttccagcaacttgccgccggccgtggtcaccgcagcgaccacctcggccacatcgcgcaccgcgatcgtcgcgacatgggggcgcacccgggcgtctgccccctcgatcaggagaaaatcgccgacccgggccagccgggtggcgccgaacgtgaaggtgtgcggcgatgattgcccggtcaattgctcatacaggggtaacgagcctgccaggtcgtcaacgtagatccgcgccaggaccctgatcacatttccctcggacatggccccattgtgggcccgtgcacagcgcccgaccatcacggcgggaaagcggtggtgtcctccgcggacggactcagccctcccgcaccccgagttccagcggggcggcgaagaaccgcagctcgtgccagcttgcctcattgaacgcctgccacatccggtgtcgtccgggctcggtgctccgggctgcggcggccccggcgaaaccgatcgcctgacgggtctgttcggcaaattcctcgtccgagtaggtatcaagccaggaaccgtagcgatgcccgggccggttgagtcgtgccaaccgtgctcccacgtcggcgtagatccaatagcagggcagcaccgcggccacgatctgcccgtagtcacggccggcggccacgtcggcaagctggtccaggtaggcctgtgtgaccgggctgggcgccaggtgggccatggcatcggccggaatccaggacttgtgcagctcaagttccatcgccaccgagctctgggcgccatgggtccagaactcctgttctgccggggttggcgacacctcaccggcagcggccaggatccgggcatagtcgtgcaggtagagggcgtcctgacgcaggtaccacaggaaggcctcacggggcaggctgccgtcgcccagtccacggatgaattccagctcgtcgatctggcgacggatgtcaccaatgcggccccaccaaccgtcggtgatctgccgggcaacggccgtagggccggaggtggggggatcggtctgcatgcgcatcaaggcgacatcccttcgttggtacggcctggaccaggttcgacgggcgcgatctcgacccgctggggcgccccgtgacatgggtgtggccgtcagcgtagcgtcggccccaccgcgggggcggtagcgactctcgtgatcgcttctgttgctgcatagactgcatgccatggccggacgtatcaatgacgaggacatcgccctcgttcgtgagcgtgcccgcatcgacaacatcgtcggtgcctatgtcacccttcgcaatgccgggggcggctcgctgaagggcctgtgccctttccatgacgagaagacgcccagcttccaggtgacgccggcccgcggcctgttctactgcttcggctgcggggtgggtggcgatgtgatcaccttcatgcagaagatcgacaacctcaccttcaccgaggcggtccagaccctggccgacaaggtgggggtgcaactgcggatcgtcgacgacggcaagccgtcgctcccggccgggctgcgggtccgcatcatggaggccaacaagctggccgccgagttctactcgaaggcgctggccgctccggaagcgctcgaggcgcggcgcatgctcgacgggcgtggcttcgaccgtcaggcggccgaacacttcggcgtgggctatgcgccccgtgacggacgcgccctgcaccgccacctcaaccacgccggattccgtgacgacgagctcgtatcggccggcctgatccgcgaacatgggggttgggactacttccagggccgggtgatgtggccgatcaaggactccggggcgtcagtgctcggattcggtgcccgtcacctgtatgacgatgaccggctgcccgccaagtacatcaacacgcccgagacgccggtctacaagaagtcgcacgtgctctatggccttgacctggcccggcagaacatcggcaagaagctccaggccgtggtgatggagggctataccgacgtgatgtccgcccacctcgccggcgtggacacggcggtggcggtctgtggcaccgccttcgggccggaccatgcccggctgcttcaacggctgatgggcaacaacgattcgacccagggtgagatcgtcttcaccttcgacggagacaaggccggtcaggcggccgcactgaaggtgtacaagctggaccgcaccttcaccacccagacctatgtggccgtcgaaccgaacggcctggatccctgtgacctgagaatggccaagggcgatgccgcagtacgcgaacttgtcggacgtcgcgagcccctctaccgctatgtgatggctcacacggtcgccggatacgacctggagcgggccgacggcagggtcgctgcggtgcgagcggcggccgggatgctggcctccatccgcgatgccaacctggtgggggaatatgtgcgggacctgtcccgactggtcggcatggacgtggacgaggtgcggcgcatcctcaagcaggcccgcaatcagggtgccggcggacgccgcgagcccccggtgccggtggtcagcgaggatgccgatccggtggaaccgggcgactccccgggttggcccgatcgcaatgaccggaacctggatgtcgagcggggcacgttgaagctgatgctccagcatccgacgttgttcgataccgcctggaacggcgtgtcgacctccgatttcacccacccggcgttccgggcgttgttcggcgcgatcctgtcgaccccctatgtgccgaccggatggaccgacagccttcagcaggccaccggcgacgagctggtccgccagctggagattgcactcctggtggagcccatcctgcgcagtccggatgagggatatgcctcggcctacacctcgcgcctgaagctgctcaccacggctcgggcgatcgacgatctcaagtcgcggctgcagcggaccaatccgctccaggacaaggacgcctacgacgccatgttcatgaagctgctcgacctggagaccagccgcaagaagctgtcccaggccagtctcggcctcaccgaatagggccccggccccaccgcccgaccccgacggccgtccacagccccgggaacgccctgtcggatcatccacaggcatggtggcgccgacgacccgccggcagactgccgccatggacgccacacagattgccagcatctcccctcgcctggacgcagccgatgagcgggagctcgcccgcctgatcgaggccggtgtctttgccggccatgccctcgagcaggaccagtcgccctgcggtgccagtgctgaggagctgaggcaggtggtggcgcacggtgagttggcgtggcagaagttcttcgagggaaatatctccctggtgcgttgtgtggtcgcccgttgggtgccggtcacccatcctgattcggaggatctggtgcacgagggatgcatgggcctggtggaggcgatcatgcgctttgaccatgcacttggatggcggttcagcacactcgcgtggtacctggtgtcccagcaggttgccatcgccgcagtgggtaatcgcagctgcggatcaggaaccgttgcccatgcccggcgcgtggcgcggatcgaacgtgcccgatcacgcgcgtcggccagtcgtggggctccggtgtcagaccgcgaagtggccgatctcgtgggtcgctcggtggaggccgtgcgccgcgacctgggccaggcccggcgcgtcgaggccgatcagggaatcctggagcagaccatccccgacgaacgacccgtccacgatgtcagcttcctgtcggaactggccgatcaggaacgccgtgtcctggagctcaatttcgggatccgcaacgggcgcgcgcagacgctcgtgcagatcgcggagcacatgggaatgagcgtctcggcggtgtcccgcctcaagcagcgggccctgcgtcggggccgggcattggtccacgccgaaatcgccgcatgaccgaccgcgccgatcatgcgggcttgccgggccccggaggcccgtcggacaggaacgctgtcacagggcggaatccgcaatgggccacaattgggtcatggcatcttctcgtgacacccatgccggccccggccgggaacagctcaaggcgctgtcgactgtcctgggtcatcgaccctccgtgctggcgacggcttcgggacccaccgggacctgcctggccacgccggaggccttctgcgtactgacgaccgaggtgcccgcatccgacgccgggcagtccggccggggaacgtggcaggtcatcggttgggagaacatccagagtggcgattgggacaacgccaccaagaccctgtcgtggctcctgctcgacggcacggtcggacagatcgccgtgacgaccacggatcgtctcccgggagtcttccgcgaacgggtgcgggcgtccatcctggtggaggacaccagtgaggtctcggagggaaagggctcggtgctcatcgcgggacgtcgcaacccggtggccgacggtcccatcacctggactgcacagcccctcaagcgcacgaacatggcggaccccgaggtccgggaacacatcgtgcgccgcaccgctgagctgcgcgacgagtacgagctgtgagcgaccgccccaggctcccggatttttcttgacagggcattgctggtatcgttttacgagcgttgggcagcttgcccagccgatccctggtagctcaattggcagagcatctgactgttaatcagagggttactggttcgagtccagtccggggagccaaccatgtgagggcacccgccggtatccggcaggcgccttttccatgtcccgacatcacgccggctgtggccgcacgggccgtgccccgggagcccgcgaggcgccccgggtacgcgaccgggacgcgccgccgaaccctgttcagcccggtggcgcgtcgccgggtcccgattacgcggcggcgatgggtgccggctgaccgattcggcccagcagctcggtgtaccaatcaagggtgatgtcgaagggcttgtggcccgcgatccgcttgaagtcgatcacgctcagcttgtcgcctgcctcctcgtcctgaccgaccacgccgggggtgccggccagcgccgcatcaaccgccatcgtagcggtggcggcgatgagctccaggtcctgggcattcgacttggcggagcggctgaagtaaccggacttctgcaccatggtcttgcccgcaccgatgcgctcggcgaactgcttggcgaaccacgccccgggattgatcttgtcgagctgcacgtggccgaaggcgtcagtgggcacctcctggcccgtggcctgcatctgggcgacgatgtcgggaacgccggctccctccgagatgaagatattgacgcttcccacctcgtccatcacggtgcgcaggcgctcggcctcggcgtccaggtcgatcgtggcctccggcacgtacagggcgtggatatcccagccacgtcggtcgagaccggcctcggggagccactgttgctcgtcgagccaggccacgtaacgccgcgaggtctcggccgccaggtagccgcagttgcggcccatgatctcgtggatgatgagttcgcgcggagcggcattgtgctcggcgatcacattcgccgcgaagcgggccccctcgtcggcggccgtccaggcacccagcgactggcggatgggcacgatgtcgttgtcgatcgtcttgggcagccccacaaccgtcagcgggtagtcatgctgtgccaggtaggcggccaggtcggcggccgtggtgttcgtgtcgtcgcccccgatcgtgtgcagcacgtcgaccccgtcggcaatcagctgatcggcggcaaccttgaggggatcatcgccggaagcaaccaggccccgcgcaaccaggtccttcacattggtgagcttgacccgggagttcccgatcggtgacccgccgaagctgaagagccggtcgtagtgtgcgcgcacggcaggggagaactcgagggaatcgcccttgagcaggccctcatagccatagcgatagccgatgagggtcgtttcgggtgatacctcggtatagcgcttgatgagctcagcgatggccgaggaaagacagggggcgaagccaccagcggtcagcagagcgacctttttcaccattgagatgggcctttcttgtgaatgagtgtcggcctgccgggcagcggccgaccaccttcagcctaaggcaatcggcgggcgcgcgccgtgcgggcaccgcccggtcccatggccgcaccgggcaaccggttgggcacctgtgtcggcgacaccgcgggcacgaagcttgtcgccgcgcccggcgctgtgtgacagtaggggccaaccccccccaggagaactccatgaaccatccacgacgtgaagtgcgccctcggcctgacgacgagcgcggcgcgagcgtgagcgtcctcatcgccgcgtgcattcccgctttcatcctcatctgcggccttgccgtcgacggggcccaccaggtcagcgcgcaaagggccgcggcggtcactgcggcgcaggctgcacgcgtgggcagcgattccgcggcaaccggtcgcctcaatggcctcgacgcccgccaggaggcgatgcgcgccgcccgggagcatgtgggcacccaacccgacatggcctgcacagtggggatcgacgcgaatgatcgggtacacgtcgaggtgagcacccgggcggacaccgccttcctgtcgatcatcgggatcaaccacctcaacgcccgcggcgcggcgacggcagagctgcgcccggtctgaaccggggcatttcacgccacttgcccggcacgcacgcctcagcagtgtggattgcctagtcttgggccatggctcgttattacccggttcacccggagaatccgcaggcccgctcgatccaccaggtggccgacctgctccgcgagggcgcggtgatcgcctatccgaccgattccggctttgccctgggcaccttgttcggcaacaaggagggcatcgacacgatgcggcgcatccgtgatctggatgaacgccaccacctgtccgtcgtggtcagcgagttcgcccagctgggccgctacgtcgacatggacaatcgcgaattccgcgcgatcaaggcctcgacgccgggccccttcaccttcatcctgcgtgccacccgtgaggtgccccgcagcatgcagcaccccaacaagacggtgggcgtgcgggtgcccgaccatgtcaccgccctggccctgctcgacgagctcgatgaaccgctggtctccagcacgctgatcctgccgggtcaggaagagccgatgagcgagggctggcagatcaaggaagcactggacaatgacatcgccgccgtgctcgattccggcgacgttggccatgttcccacgaccgtggtcgacctgaccggcgaagagccggtggtggtccgccgcggcggtggcaagaccgagctgttcgactgacctgcggacctgccttcctgctgccgacgcgggcagcgggagggcgccgtcagccggtgagtgccagggatgcgcccaacgccgcgacgatgggcaccagcaacaaccacagtgtcggcgtggtcgtgcggccacgccgtcgcgcgtgggcgatgaggaatcccgcacccagcccgatcaggaagccacccaggtgaccctgccaggcgattcccggcacgatgaagtcaaagacgagattgatgccgagcagcacccagattccggtgttgcgaatgccggcaagcttgtagaggccgaagagcaggccgaacaggccgaagaccgcagctgacgcgcccacgacggcgctgtgggtgcccgacagtgttgcgaacagaatgaacagtgcgctgccgcccagtgcgctcaacagatagctgagcacatagtcgcggcgtccgatggccggttcgatggcccggcccaacagccacaacatgagcatatttcccgcaatgtgcatgaatcccgacaccgaatgcgcaaacgccgaggtgatcagccgccacggttggctctgccacgaccaggtggtcaggatgacgtcgcggttgaatccgggcaccaccagctggcacagccacaccaccacgcagatggcgatgatggtgtaggtgaccggcatggaactgtgcgttcgtgcccagccgccctgggccggttggttgaaccagtgctgggagcgtgcgtgggctcgtggcggggtcggatacgacgactggcgcggcgggggctgccgcgggggcggtgttgcggagccggaaggtgggttccatccgccgtagcggggcgggggaccgaaggagcccgcaccgggcacctgcccgctgccgggtgactggctgcgcggaggctcgaaatcggggcgctcgggaggtgcgtccccggaaccagaatcgtcattcatccatcgagcctatgttgccggccaccatgcccacgcactgaccatgccccgtccccgacgcaagggggatccggccccggggcggggagttgtgccggcgatgaaatcgaggattggcagggcgccaagacgcgatcattttcaattacatggcaggatggggacatggctacttgggtttttctccacgcacaccccgacgatgagagcacccagacatccggaacgatggcgatggcccatgagcgcggagaccgcgtagtgctcgtggtggccaccgacggcgagcagggcaccacgcccccggacctcaagccgggggagagcgtcagtgatcgacgccacgccgaactcaccgcggctgccgcggtgatcgggatcgatcgggtcgtctggctcggctatgccgattccggaatgaccggttgggcccagaacaaggctcccgaggccttctgcaatgcggacctcgacgttgcctcgcagcgcgttgccgacatcctgcgcgaggagaaggccgatgccttcgtgcactacgacccgcacggcagctacgggcatccagaccacatcatggtgcaccgggtgggagctgcggcggccgcgaaggtcaccgggcccatgcgcgtgctggaggagacgattgaccgtgacgcccgcggcgacgatccggacaagatcgaggccctgggcctggccgacaacgatttcgcgaccggggccgcgctgggggatgacggcaagcccatcggttcaccgcgctccgagatccggtgggcggtggaccttccccagcgcatcatcgacatcaagcacgaggcgctggcctgccacgcctcacagagcgacgcggagttcttcctgtcgctgccccgacccgccttcgacttcgtgttcaagaccgagtggtatcgcgaaccgggcaatcccggtccgtacacccacgcgtggccgttggatgggtgagttcgtgggcggatgatccgcagaccaacggaggaggggcagcaaccacgtggttgctgcccctcctccgttgaagcgggtccgatggtggcgggcccggcgcagggggccaacgcccctcacgccgatccgcgtgcctcagtcgttcggaatgtcgggatccgcgggcggctggggtccgtgatggccgtcccgggggccgttgtccccgtgatggtccgagtggtgctcgtcctcgtcgtggtcgacggggccgacctggggtcccttgtcactgtccggggtgccggggtcgaggcttgccaagtagtcctccatctcctggccgatctcatcggcatcggggatgtcctcttcgttcatgggcagggagtggtcctgcatatagcggtcgtactgctcttccatctggccgatcatctgctggagctcctcggactgctccacctgggcgtcgatctgggcgcgtgccaggtgggatgcctgttccagggatgccacggggatgttcatgccggccaactcgttgagcccgttgaccatcgcaatggcgccgtcggggtattcggtgtcggccaggtactgcggaaccctggccacgagcccgatcacgtcacgacccttctcgccgaggcgctgggtcatcatcgccaggaacgaggaactcatgcggaaggagccgctgccacgattgcccgggatcaactcgggccgggtggcgaccttcagcaggttgatcggacgcgtgtgcggcacgggcatgggcacgccctgcgcggtgacgaccaactgcacgtccatctggtccatcagccactcgatcgtcgcgctgacacgctcccattgcagggccggctcgggaccggtgagcagcaggaacggattgcccgacttgtcaacgacctcatggagggtcatggacggcggcacgtagttgtcgtaatggtcctggtcaaagtcgatgggaggacgatggccgcggtaatccatgatctggtcgacatcgaaggtgccgatcttgcggtgggtcagtgtgttgagcaggtgctcgtcgacctgggcctgactcgcccccacatcaccaaagctgcccaatgtgaccaccatgacgcggtcgtgaattgtgcgctggtcgatcgtgggctcgtaggaaaagagcgttgtcggatcgatcatgtcgtctgcctcctgcacgtgtggttctgccacgtacgcccatcagaacacacaagggagcacagacattcccgtgatcatctggcgcgtcgtaatgaccggacaatctagcggtgctacggacggggtgggcgccgagcgtgaccggcgtgtcgtggacgccgatcaggtcagcaggctgcggtcggacagctgggcgcccttgatgtgttcgaactgggcaagcaggtcggcgaccgtggcatcctccttcgcctgtcccgacagctcaaggatgatctggccctcatgcatcatgatcaaccggtttcccagtcgcagcgcctgctccatgttgtgggtcaccatgagcgtcgtcagggcatgggcttccaccaactcgccggtgagcttggtgatcagttccgcgcgctgggggtccagggcggccgtgtgctcgtcgaggagcaggacccgcgggttgctggaagtggccatcaccaggctcaacgcctggcgctgtccgcccgacagcagcccgaccttggccgtgaggcggtcctccaacccctgctggaggacggtcagttccttgcggaaacgtgcgcggcgggctcgggagacgcccctcacgaggccacggaaatggccgcgggacagggcgatcgacaggttctcctcgatggtcatgtgggcggccgtgccggccatggggtcctggaagaccctgccgacatagcgcgccacccgatagtcgggcatcttggtgacgtccttgccgtcgatcgtcaccgacccggaatcggggcgatagcgacccgcaatgatgttcagcagcgtcgactttccggctccgttggagccgatcaccgtgacgaaatcacccttgtcaagggtcaggtcgatcccgcgcagcgcgaccttctcgttcacggtgttcgggaagaacgccttgctcaccgagctgacttccagcatctcaggctcctggcccgaccaggcccgaggcctggtcgcgatcttcgagtggaccgatgatatccggctccgccggcagtccccgggctcgccggcgtgcccgcatccgcgagacgacgccccatcggggcagcagcaacgccagaacgacgatcaccgcgctgacgagcttcatgtcgttcggatcgagtccgaccatgagggccacctggatgatcacccggtagagcagtgaacccagcaccacggcgatggtcgccacgaccaccagtgaggagttgaggatcgccgtgccgatgatcaccgatgccaggccggcgacgatgagcccgatgcccatgccgatgtcggcgaagccctggtactgggcgatgagcgagccggccaggccgaccaggccgttggacagggacagcccgacgatcttcatggcgtcggtattgatcccgttggcccgcgccatggattcgttgtcgccggtggcccgcagtccgaagcccatgtcggtggacaggaaccagtcgagcaccaggatgaacaccacgatcatcgccgcgaagatcgcgatggacgcccatgtggcgagcatgccgttcgaccgcaacggggtcatgagcgtcttggaacgcagcaggggcacgttcgccttgcccatgatgcgcaggttgatggaatacagcgcgatttgggtgaggatgcccgccaacagcggatggatccgccccttcgtcgacaggagccccgtgatcgcgccggccgccaggccgccgcagaacccgagcagtgtcgccaccaccggattcccgcccgcagccaggtgggtggcagtgagggcggccccggtggtgaagctcccgtcgaccgtcaggtcggggaagtcgaggatccggaaggtgaggtagacccccagggccatgagcccgtagatcaggccaaggtcaatcgcgccgagcatcagggactagccgaccttctcggccttgctggccaggtcgtcggggatcgtgacccccatcagggaggcggccttctcattgacgtagagcttgaggttcttctgggtctccacgggcatggtggccggcttcgcgtcgccgttgaggatcttcacggccatctcgccggtctggcgacccagctcggtgtagtcgatgccgtaggtgatcacggcgccattcctcaccgaatcgccctcggcggagatcagcgggatcttgcggtcctcgcacacctggatgacggtggacaggccggacacgacgttgttgtcggtggggatgtagatcgaatcgacattgagcgcctgtgcggcctgctgcagctcgccggtggtggtgatcgtcttctcctgcaccgacagtccgtccttggcagccgcctccttggcgaggttcacctggacctgggagttcacctctcccgacgagtagaggatgcccacactggtcgcatcgggcttgatctgcttgatgaggccgatctggtcggccaccgggttcatgtcgctggtgccggtgacgttgccgcccggggcatcattcgacgccaccaggtcggccgacttggggtcggtgacggcggtgaacacgatcggcacattggtgatggcctgggcggcggcctgcgcggccggggtcgcaatggcgagcaccaggtcgaggttctccgaggcaagcttcgtggcgatgctggcggcggtgccctgatcgccctgggcgttctgctcatcgaagctcgcgttgaacccggcgtcggtgatcgccttcttgaagccctcgcgggccgcgtccaacgagctgtgggtgacgatctgcgtgatgccgatcttcaccttcttgccggtgccgctcgaaccgctgcctgagctcttgcttgaacaggcggccaggggaacgctgagtcccatgatgcccagggttccgagcagagtacgtcgcttcatgatgatcgctttcgggttcacgtgggttgatgaacgatgtctaaaactagtggtcgagcgctcgcgaggtcgcgggtctcgcgcgtcaagaccagaaatcgacccgtgatcgggggtggcgccggccccgcagtactccgtcgggacgtgaaccaccgctaagctggcgccctgttgaaaggagccccatgacgacaccccgattcgtgctcatgcgccatggcgaaaccgactggaacaccaagaatcagtatcagggctcctctgatatccccctcaatgccgtgggacgtgcgcaggcgggcgcggcggccgggtggatcgcgcatctgaaccccgtcgccatctgggcgtcgccgttggagcgggcactcgacacggcgcgcgcggtggcctcgttcaccggtcagcaggtcaacgtcgacccacgactggccgagctcgactacggggacttcgagggctggacctgggaacagattgagaaggtggagccgggactggccgcctggcgcgacggggagtccgatggccgctggtcggcgtcgggggagaccggggccgaagtgatggcgcgcatgggtgagacgctcacccacctggaccgtgtcaccgaacccggcccgatcctggtctgcagccatggcacggccatccgtctgggcgtggcggcgctggtcggctgggactacccggagatctggaaactcgcctcgatgggcaactgttgctacaccgaggtcatccgtgagtttgacgcctggcgggtcgagcgcttcaacgtgccaccgcagtggaacttctccggatagcgccgtgctaacttgaccggcatggccaagcccgcagacaacattgcagcctccgatttcattgccgacgcgatcaccaaggacaacgaggtcgggacctacgcgcagcgtgtccagacccgtttcccgccagagcccaatggctacctgcacatcggccatgccaaggcgatcacggtggacttcggcaccgccgaggagttcggtggactgtgcaatgtgcgcctggacgacacgaacccggtggccgagaacccggagtacgtggaatcgatcctggccgatatcgcatggctgggttaccagccgcacacggtggtgcacgcctcggactatttcgaacagctctaccagtgggccgagtacctggtggagcagggccttgcctacgtcgacgaccaggacaccgagacgatctccgcccaacgcggcggcttcggcaagccgggcatcgagagcccctgccgtgaccgcacggtcgaggagaaccttgacctactgcatcgcatgcgcgccggagaattcgacgacggcgcctgcgtgctgcgcgcgaagatcgacatgcagtccgacaacatggtgatgcgcgatccggtgatgtaccggatccggcatgccacccatcaccagaccggtaacgactggccgatcttccccacctatgactgggcccacgggcagtcggatgccatcgagggcgtgacacattccctgtgcaccctggagttcgattcgcaccgtccgctgtacaactggttcctcgagcacctgccgttgcccggggaccagccacgccagatcgagttcgcgcgactggagctgacctacaccgtcacctcgaagcgccgactggccaagctggtggcggacggcgtcgtttcgggctgggacgatccgcgcatgcccaccctgcgtggcctgcgtcgcaggggatacccggcggccgcagtgcgtgacttctgccgcgatatcggcaccacgcgcacgaactcgcgccacaacatcgaggagctcgagtccttcgtgcgccgggagctgaacaagaccgcccagcgtcgcatggtggtgacgcgtccgctcaggctcgtgatcgacaactggccgaccgacgagcacggggcccccgaggtcgactggttcgacgtgacgaacaaccccgagaacccggccgacgggacgcgccgggtgcccttcagcggggaactgttcattgaacgcgacgacttcgccgaggtgccgccacccaagttcttccggctatccatcgggcgcgaggtgcgcctgcgcggtgcctacttcgtcaccgccacctccgtggtcaccaatgaggccggtgaggtcaccgaggtgcatgccacctatgatccggcgacccgcggcggggacgccccggatggccgcaaggtgaagtcgacgatgcactgggtcagcgcggcccacgccgtcgacgtgaaggtggccctgtacaaccggctgttcaccaccccggcccccggcgagcggacgggcgaacccctcgacgacctgaacccggactccgtcgaattgctcaccgatgccaagggcgagggcgtgatcaatgaggtggagccgggacaggtggtgcagttcgaacgcctcgggtacttctgcgcggacctcgacgagccccgcctgttccaccgcaccgtgggactgcgcgacgagtgggccgcccagcagcgtcgtgccgccaaagcagccaagaatggttgagccggccaggaggggttgagccggcggggcacctgcgggcgcggtcagaccccggaggccaccagggtgctcactgccgccaacggctccacgtcaccgaccagctcgacccgggcatggcgtccgaacatccacagggccagctgcggtgcggaaccccttgcggtgacgatcggcaggccgcgccggacgatgatccgggacgggtgcggggcatcgaggcgctccagctgcaccccggcgggggagcccctcagcaacatcgtggccagcggcggcatccggtgccacaattcgtcgcgcaggcgctgcgatagcccacggtcggatcccaccgggtcgttgccgccgtgggggaccgcgtcggtcacgtcgtggaggtgcacgaagtactccagcgcgttgccgatgcgatcgagctgcggcgcgcgccacacggaccatggccgtggaccggcccggaacaggcccaccaccccctgatagccatggcgcgtcagggcccgctccatgctccgggtggtcagccgctgggctgccggcccggcggggccggggagtccggcgatgccgggcaacgacagcgggtcgttctcgcgaacgtaaagatgggccgccaggtcggccgtcgtccaccccgtgcacagggtcctggcgtccggtcccgcctgggtcagggcgtcggcgagcgccagccggaagacatgggcggcgtcatatcgaggatgggttgccacgtgatcactgtaggcgggtcggggcgtccaccggccgccatctggcgtggacatcggggggctggtccgatggggaacaatggaggcatgtcgaccaactccgcccgatccactcgtctcgacgtgtccgccccgacgcaggcggacgcgggggtgccgaccctggacccgtcgatagcgcaacgtctgaagcgcaacgaggccggtctcgtgccggcgatcgcccaggaggcgaccagtggtcgcgtgctcatgatggcgtggatgaacgacgatgccctggcccgcacgctggccacccgcaaggccacctattggtccaggtcgcgacaggagttgtgggtgaagggtgagacgagcggtcacacccaggccgtccgcgacgtgtggctggactgcgacggtgacacggtgctgctgagcgtcgaccaggtgggcgccgcctgccacacgggtgccgatacatgttttgatgccggcggtccgctgccgctggcgggggagtcagtgatcgcgtcgtgagcaggcagttgcgcatcgaaccgtccctggagggctttcgcgaacaggccctggaccgccgcgtggtgggtgtacgcacccgcctgcgggccgacgacctcacgccgatcgccctgtacgagcagctcaccggcgaggccgagggcagcttcatcttcgaatcggtggagcagggcacctggtcacgctggtcgttcatcggcgtgcggtgtccgtcgatgctcgtggggcgtggcaacaccagcgaatggttgggccgaccgctggagggcatcccccgccacggtccgtgcctcgatgtgctcgccgcgacgctccgtgcactgcacacccccgccgatccggagctgccaccgttcagttcgggcctggtgggctatctcgggtgggacgtcaagcgccaggtggagccaagcctgggcgagcccaatcccgatgacatcggcgtacccgactccgtgatgatgctcgccaccgacatggcggtgctggaccatcaccgtggcgaggtctggctgatcgccaatgccatcaacttcaatgacaccgccgagggcgtcgacgaggcataccgcgacgccgtcgaacgggtgcaccggatggccaccaggctgaccagcccgcggcccgccctcctggcgagcatcgagcccgatgcacgtccacaggtgaccgaacagcgggcacccggcgagttcgaggcgatggtggagaaggccaaggaatacgtgatggccggcgacatcttccaggtcgtgcccgggcagcgcttcgatgtggacgtcaccgcctcgggcttcgacatctaccgggaactgcgggtggccaatcccagcccctatctgttcctgctgaagctgcccggcttcgacctcatcgggtccagcccggaggccctggtcacggtcaaggacggcgtcgcgacgacgcatccgatcgccgggacacgtccccgcggcgacaccgaggcagaggaccggcgccttgaggatgagttgctggccgacgagaaggaacgcgcggaacacctgatgctcgtcgacctgggacgcaacgacctgggtcgggtctgcatcccggggaccgtgaccgtcacccagttcatgcacgtcgggcgctacagctatgtgatgcacctcgaagccgccgtgaccggcagcgtcgagccgggattgtcagcgctcgacgtcgtgatggcctgcttcccggcaggcaccctgtcgggcgcacccaagctgcgggccatgcagatcatcgacgaactcgagtcgaccgcccggggaccctacggcggagtggtcggctacttcgacttcgccggaaatgccgacaccgcaatctgcatccgtaccgccctggtcaaggacggcgtggcccatgtctcggccggggccggcatcgtggcggactcggtgcccgccaacgagaatgcggagagccacaacaaggccgccgcagtcctcgtggcgctggcccgggccaatgcctcccaccggatcaccccacagacacttctggagcagtcatgaccaccgtgctcgacgacatcattaccggcgtgcgcgccgacatggcggcccggatggccgtggtggcgcccagccagctcaaggaacgcatccgatggatggggccgaccctggacccgcgccccgggttcggcggggacacgatctcggtgatctcagaggtcaagcgctcgagtccctccaagggcgccctggcgaccattgaggacccggcgacgatcgcctcggcctatgaggccggcggcgcggcagccatctcggtgctcaccgagaggcaccgcttcaatggcaccctggacgacctgcgcgccgtgcgtgaggcggtcgggatcccggtgttgcgcaaggacttcgtcgtcgacccctaccaggtgctggaagcccgcgccttcggtgccgacctggtactgctgatcgtggcggcactcgatgacaagcaactcgccggcctctacgacctggccctctcgttgggcctgctgcccctcatcgaggtgcacacggccgaggagatgcgtcgggccgcactgctcaagcccgagctggtgggcgtcaacaaccgcaacctcaagaccctggacgtcgacctcgcccaattcgagcgcctggcaccactggcgccccacgatgccatcgtggtggccgagtcgggcatccgcgatgccgccgatgtccagcgggtgcgtgcggccggagccgatgtggtgctggtgggcgaggccctggtgaccagcggtaatccgcgtgaggccgtgcagacgatgatcgaggcgaccaggccgggccgcgggcccgcaggatcgccggggagggcgacagtgatgaacgacgacaggcagggggagagcaatgagtagcactgcaagggagctgcctgatgagctcggccactttgatttcttcggtggccagttcgtaccagaggcgttgaaggccgccctggaggagctgacggcggccttccgcgacgcccaggacgatccgtcgttcgccgaggagctcaaggacctccaggtcaactacgcgggacgccccagtccgatcaccgaggcccggaacttcggtgacaagtactgcggcggggcccgcatcctgctcaagcgcgaagacctgaaccacaccggctcacacaagatcaacaatgtcctgggccaggggctgttgacgcgtcgcatgggcaagaagcgcgtcatcgccgagaccggcgccggccagcacggcgtggcgaccgccacgatcgcagccctgatgggcttccagtgccgcatctacatgggcaaggtcgataccgatcgacaagccctcaatgtggcgcggatgcagctgctgggtgccgaagtggtggccgtcgaggccggcagcgccaccctgaaggacgccatgaacgaggcgttgcgtgactgggtgaccaatgtggccaccacgcactacctgatcggcaccgcatcggggccccatcccttcccgatgatggtgcgcgaattccaacgcatcatctccaccgagtcacgcgcacagatgctccagcgcttcagccagctgcccgatgccatctgcgcatgcgtgggtggcggatcgaatgccatcggctcgttcgccgactacatccccgacgagaacgtcgccctctacggattcgaggccggtggggagggagtcgaaaccggccggcatgccgcgtccatcaacgggggctcgctgggggtgctgcacggcacccgcaccttcgtcctgcaggacgatgacggtcagacgatcgagtcccattccatttcggccggactcgactatcccggtgtgggtcccgagcatgcctatctgtcacgtaccggacgggcccactacgagccggtcaacgacgacgaggccatggaggccctcgaccacctgacccgctgcgagggcatcatgcccgcgatcgagtccgcccatgcggtggccggcgccgaacgcgtcgccaagcgcatgctggccgagaaccccgaccatcgccccaccttgctggtcaccatctcgggacgtggcgacaaggatgtggacaccgccatgaagtacttcggggtccggggcaccgtcgacgcgacgacagggagcatgtcatgagcactaccgacctcaccaagcccttccccgacgagaaccggttgggcatctctggcaagatggtggccgcctgtcgcgagcagggcaggcccgcgctggtcggctacctgccggtcggctatcccgacgtcccgggatccatcgaggccatgcaggccctcaccagcggaagccagggacagggcgtcgatgccgtcgagatcggcatgccctactcggacccgatgatggacggtctggccatccagcatgcgacgacgaaggccctggcacggggagtccgcaccagggacgtgttcaccgccgtcgaggccgtcgcccataccggcgcgacccccatggtgatgatctactggaacctggtggagcaccacggcagccatggtcggaccacccacccggaggaatccgtgcgtggcttcgcccgcgacgtggccaatgccgggggagccggactcatcacccccgacctcacgcccgatgatgccgccatgtgggcggccgcctccgacgagttcggcctcgaccgggtctacctggtcgcgccgtcgtcgacggagcgtcgcctgaagatgaccaccgacgcctgccgcggatgggtctacgccaccagtgtgatgggagtgaccggggcccgcgccagcacttcttcggcggcaccacagctcgtggagcgggtgcgccgcgcggcccccgacctgccggttggcatcggactgggcgtctccaatggcgagcaggccgccgagatcggctcgttcgccgacctggtcatcgtcgggtccgctctggtcaagcgactgctggacgccgaggacgctgggacacgcgacctgggtccgctgcgggcaactgtcgacgacctcgccgcaggggtgaggaaggctcggtgagcccgctgttcatccccagcccgccgatcagcagcttctcgctgggaccgctgacgatccacttctacgccctgtgcatcctggccggcatcgtggtcgccgccgtgctgggcaatcgtcgcctggcgcgccagggcgcaacgcgtgagcagttcgagtcgatgctgctgtgggtggtggtcattgggatcatcggggcacgtgcctaccacgtgatcaccgatcacgagctgtacttcggacccggacgccacccgatcgacgccctcaagatctggaacggcggactcggcatctggggcggggtcgccgccggcgcgctcaccgcctgggtgtggtgccgacgcaacggaatgcgattcggcgtggtggccgatgcccttgccccggccgtgatcttcgcccaggccctggggcgcctagggaattggttcaaccaggaattgttcggccgccccacgaccctgccctggggcctcctcatcgatcccgagcaccggcccgtgggctatgagcagttcgccaccttccacccgaccttcctctacgaattgatctgggacgtgctgggtggcttcctgctgttgtggttgggacgccggttcgccatgggtcggggcaagctgttcacctgctatgtcatgtactactgcctgggtcggttcttcatcgaggccctgcgcattgacccggcgaacaccatcggtggattccgcatcaacaactacacctcggccatcgtgttcgtgctcgccacgatcctgttcatctggcaactgcgcttccgtccgggcaacgcacccgacgtgtggcgcgcctcgcctgacacggcagtgccgacaggcgaccacccggcggggcccgcaccgatcgcggacgacgcccccacgcaggtttccccgggccctgacgcgtccgggagcgggacccacgtgcccaacgccccacggggcgagtccttcaactgagccgcgcgctcgccggcgcggacacgatcacggtgccatcgggcatgccctgcgggggctgcccggcccgtccgctccgtaatcgccgtgatcagcaccacgcagcagcgattattctcgcgtcgagacggagggaacatcacatggcgctaccagaaaagcagggtctgtacgatccggcctacgagcacgactcctgcggtgtggcattcgttgccaagctggatggacacccgagccatgccaccgtcgagcaggggctggaagcactggtcaacctcgaccatcgcggggccaccggggccgacccggcagccggcgacggcgcggggatcctggtgcagatgcccgatgccttcttccgcggcgcggtggacttcatgctgccccccaccggacagtatgcggccggcatggccttcctccccaccgatgaggaggaacgggagatggcgatgatctccatcgagaagatcgccatcgaggaacgactgaaggtcctcggctggcgcaccgtgccggtggcaacgtcgacgctgagcccgatctccctgggggtcatgccgcacatggcccagctgttcgtgtcggcccgtgacggttcggccggcattgacctcgaccgcaaggtctacatggtgcgtcgccgcgccgagcatgagaccaacacctatttcgcgtcactgagcgcacgcaccatcgtctacaagggcatgctcaccaccacccagctcacggagatctatcccgaactccatgatccggtgttcgcctcggccctggcgctggtgcactcgcgattcagcaccaacaccttcccgtcgtggaagctcgcccacccctatcggatgatcgcccacaatggcgagttcaacaccgtcaagggcaaccgcaactggatgcgggcgcgcgaggccctgctgcactgcgatgtcatccccggtgacttggagcgtgccttcccgatctgtaccccgggcgggtccgattcggccagtttcgatgaggtgctcgagctgctccacctggcgggacgctcgttgccgcacgccgtgatgatgatgatcccggaggcatggcagcacaacgatgcgatgcctccctcgcatcgtgatttctactcgtaccacgccagcctcatggagccctgggacggcccggcctgcgtggccttcaccgatggcaccctcatcggggccaccctcgaccgcaacggcctgcgtccggcgcgctactggatcaccgacgaccgggtgatcttcgcctcggaggccggcgtgctgcccgtggaacccggcgacatccgccagaagggacgcctgcagcccggccggatgctgctcatcgacctggccaagcaccaggtgatcgacgaccagcaggtcaaggacgagttggcccgccaggagctctacggcagctggctgcgcgacgggctggtcagcatcaacgacctgcccgaacgcacccacatcgtgcactcccactcgtcagtgacccgtcgccaggaggtcttcgggtacacccacgagttgttgcgccgcatcgtggccccgatggccaacctcggacgcgatgtgatcggctccatgggcaacgacgcaccgctggccgtgctctccgatcggcccaagagcctgttcgacttcttcacccagcaattcgcccaggtcacgaatcctcccctggatgcgatccgcgagcagatggtcaccagcctggagagccgcatcggccccgaggacaatctgctggatcccaccggcgacagctcacgccaactcgtgatcccctacccgatcatcgactccgagcagctcgccaagatcgtccacctgggcgaggccccggaccacaccggtggccagacccgcaccatccacggactgtatgaggtgcgcggtggagctgacgccctggcggcccgcctggacgagatccgtcgtgaggtcgatcaggcgatcgccgacgacatccgggtcatcgtcctgtccgaccggcacggcaatgccgaactggcgcccatcccgtcgcttctgctgaccagcatgatgcaccagtacctggtggagaagcgtcagcgcgcacgcatcggcctggtcgtcgaggccggcgatgtgcgggaggttcaccacgcggcgttgctgttcgcctatggtgcggcggtcatcaacccctatctgctgttcgagagcgccgaggacctcgcccgccatgagctgtacgtgaacgtgtcgcccgagcaggccatcgagaacgtgtctcaggccctgggcaagggactgttgacgatcatgagcaagatgggcgtctcgacgttggcgagctaccggggcgcgcagctgttcgaggccgtgggcctcaaccatgagctcatcgacaactacttcgccggcacctcgagccgggtggaggggatcggcctgccggagctggccgaggagattcgtttccaccacgagcgcgcctaccccgagaacgggaactccctgccccaccgcacccttgaggtgggcggcgagctccaatggcgccgtgagggcgagcagcacctgttcgatcccgagtcgatcttccgcctccaacaggccacccggcgcggcgactatgagcagttcaagcgctacaccgaacgcatcaacgacaactcatcgcggctgatgaccctgcgcagcctgctcaagttcagccacgatcgtccggccgtgccgctcgacgaggtggagccggccagcgagatcatcaagcgcttcagcaccggtgccatgagctatgggtcgatcggacaggaagcccacgagaccatggccatcgccatgaaccggctgcacgcccgttcgaacacgggcgaaggtggggaggaccccgagcgcctccatgacatcgaacggtgcagcgccatcaagcaggtggcctcgggccgattcggggtgaccagcgagtacctgtcctatgccagcgacctgcagatcaagatggcgcagggggccaagcccggcgagggcggtcacctgcccggcgagaaggtctacccctggatcgcccggacgcgtcacgcgacgcccggcgtgggactgatcagcccgccgccgcaccatgacatctactccatcgaggacatcaagcagctcatccacgacctgaagtgcgcaaatccctcggcgcgcatccacgtcaagctcgtgagcgaggtgggtgtgggcacggtcgcggccggcgtcagcaaggcaaaggccgatgtggtcctcatctccggacacgacggtggcaccggcgcagcaccattgacgtccatcaagcacgccggcggtccctgggagctcggcctggccgaggcgcagcagacccttctgctcaatggcctgcgcgatcggatcgtcgtccagtgcgacggccagctcaagaccggtcgtgacgtggtgatcgccgcgttgctgggtgccgaggaattcggcttcgcgaccaccgcgctggtctccatgggctgcgtgatgatgcgggtgtgccatctcgacacctgcccccagggaatcgccacccagaaccccgagctgcgcaaggtgttcgacggcaagcccgaatatgtcatcaacttcatggagttcatggccgagcagacccgcgagatcctggccgagctgggattccgctccatccaggaagcagtcggccacgtcgaggctctggacacggcaccggccgtggaccactggaaggcgcgcggcatcgacctggccgccgtgctgcatcgcgtcgacgttcccgaggggacgtcgctgtaccgcaccacgatgcaggaccacgagctcgccggcaccgtggatgagcagctcgtcgagctggcccgtccggcgctggagcgcggcgagcacgtgcacgcggaactggcagtgcgcaatgtgaaccgcaccgtcggcaccgtgctcggccatgaggtgacgatggccaccgatggcaagggactgccggacgacacgatcgacctggacttccacggcaccgccggacagagcttcggggcattcctgccgcgcgggatcaccatgacgctggtcggcgacgccaacgactacctggccaagggcctgtcggggggacgcatcatcgtgcgggctcccgccgagtcgacattcgaccagtccacccagatcatcgccggcaatgtgatcgcctacggggccaccagcggcgagatcttcctgcggggcctggtgggggagcgcttctgcgtgcgcaactccggcgcgactgcggtggtcgagggggtgggcgaccacggatgtgagtacatgaccggcggcgaggccctggtgatcggcccgacgggacgtaacttcgcggccggcatgtcagggggcgtggtgtgggtgctcgacctggcgcccgagcacttcaatgcctcgctggccgacgcggtggcggtgaacgaactcgacatggcccgaatccgcgagctgctggcccgtcacgtcgagctcaccgggtcggatgtcgcggccgccctgttggaggatccacggttggcggagcgcatgaccaagatcgtgccgcgtgactacgccagggtgctggccgcccgtcaggatgccgaaaaacgtggcgcaagcgaagaagaagtgaccgacgcaatgatggaggctgctcgtggctgacttcaagggattcatgaagtacccgcgcgaggtcgccgtgcgccgaccggccgacgagcgcgtggacgactgggatgaggtctacccgggcactcccggcgaggccgtgctcccgctgatcaccacccaggccgcccggtgcatggactgtggcgttcccttctgccacaacggctgcccgctgggcaatctcattccggaatggaatgacctcatctggcgtggtgagtggcaggtggcacttgaccgcctgcatgccaccaacaacttccccgagttcaccggacggctgtgcccggcgccgtgcgagaccgcctgtgtggagggaatccaccgcgatccggtgaccatcaagaacgtcgaggtcgccaccgtcgacaagggctgggacgacctgcgggtcaccccccagatgcccaactggcacaccctgaagacggtggccgtggtgggatcggggccctccggactggccgtggcccagcaactgacccgggccgggcattccgtggtggtctatgagcgtgccgacgcgcccggcggcctgctgcgctacggcatccccaatttcaagctcgagaagtcggttgtggaccggcgcctgaagcagatgcgacttgaggggaccaccttcaagaccggcgtgaccatcggcgaggacatcaccggtgagcagctgctcgagcgcttcgatgcgatcgtgttggcgatcggctcgacaacccccagggagctgccgattcccggccgcgagctgcgcggcgtccaccaggcgatggagttcctgccccaggcgaccaaggcgctgagcggcgaggttcccgaccagatcatggccaccggaaaggacgtcgtcgtcatcgggggcggcgacacctccaacgactgcctgggcaccgcgctgcggcagggtgcccgatccgtgctccagctggagatcatgccccatccgcccacgacgcgtcccgactcccagccgtggcccacctatccgatgatctaccgggtctcgagtgcgaacgaggagggcggggaacggctgtattccgccagctcgagcgagttcctgggtgacgaccagggcaacgtcagggccgtgcggttgtccgaggtgcgtcgtgaggcaaatggtcgcttcgccccggtgcccggcaccgaacgtgagatcgacgcccagctggtgttgttggcgatgggcttcgtcggacccgagaagtcgggactggtcagcgaattggaccttgaactcgaccgtcgcggcaatatcgtgcgtgatgaggacttccagaccaccgtgcccggcgtgttcgcctgtggtgatgccggacgcggacagtcactggtcgtctgggccattgcggagggccgcagttgcgcccacggcgtcgacgccttcctgaacggtcacccctccccgttgcccaggccgattggcccccaggtgcgccagttgatgctgtgacgccccgacacccgcgcggtcaggcgcgggtgatcggcgggttcgcgggtcccccggcgtcgggcccctcatcggggacgacgctgccctcgacgaccgtcgggccgccgaatccggcatcccgggcggccctgcgcaccccggctgcgaaacgacgcagctgcacgccggccgcgatcagcgcgaggccgaagaccaggacgccgatgcccagcaacatgcccagggcgtcggcgccgaatccgggacgtgccaggaacaccaatcccaggaccccggccactgcaccggccggcaatgaccatgcccagcggccggtggcccggcgcacggccagggagatcgccaccacgaagatgccgaacatcaccaggcaggcccccatgaagctcaccaggatgcgggtgctcatgccgggatgccacagcatcaccagcgacaacacgacgcccaataccccgacggccgtcatcaggcccgacccgggcaggctgcgcagccgcaggctcgtgaccacggtgccggcccccgagagcagcaggtagaggctgaggatcacgacgatggaggtgacggtgccaccgggccagaacagggccacggcggcgaagaccaccgccaggatgccgctgatcaggggcagcaggcccaatgtgcgcagggactcggtcagggcgtcggacaggttcatgatgggctcctcggtggtccgtacatcgatcgtgacgccccgggtccactgattcaagtcggcgggcggcgcgtgccgccacgagccgccccggcggtgccgggcctgacttcggcggactggatcgggtgggtaccctgtgaccagccgacgagcaccgtgcccgggtcctgtgacggatcggggacgggccgcccggccgtggcgctcaaggattggaattcgatggcttcgaagaacttcgctcacctgcacgtgcacaccgagtattcaatgctcgatggtgcggcgagcaacgacaagctgttcgccgaggtggcccgccagggtatgcccgcagtcgccatgaccgaccacggcaatatgttcggggcctacgagttctaccagacggccaagaaatatgacggtgagcagaacccgctggtgaagccgatcatcggcatcgaggcctatgtggccccctccacgaggctctcgcgcagccaggagttctggggaaaccgtcgcgacaccggttcacccgacaccgagggtggtaaggatgtctcgggtggtgggcgctacacccacatgaccatgttggccgcgaacgccaccggcctgcacaatctgttcaagctgagttccctggccagctacgagggctactacatgaagccccgcatggaccgcgaactcattgcgaagtactccgagggcatcatcgggtccaccgggtgcccgtcgggtgaggtgcagacgcgactgcgcctggggcagttcgaggaggcctgcgaggccgcggccgcctatcaggacatcctcggcaaggagaactactactgcgagctgatggaccatggggtcgacatcgagcatcaggtgcgcgccgacctgctgcgcctggcgaagcggctgaagctgccgctgctcgccaccaatgactcgcactatgtcaccgaggaccaggccgacgaccacgacaacctgttgtgcatcggcgtgggccgcaacaaggatgatcctgatcgcttccggttcaacggttcgggctactacatcaagaccgccgccgaaatgcgggccctgttcccgggtctcgaggaggcggccgacaacaccctggcgatcgccgagcgcatcgaatcctacgaggaggtcttcagctacgtcgatcgcatgccgcaattcgacgtgccggcgggcgagacccaggagagttggctgcgcaagaaggtcaagatcgggctgaagaagcactacggcgatcatcccagtgacgcggtgatggagcgtgtcgaaacggagctgaaggtcattgagccgctcgggttcagttcctacttcctggtggtttccgatatctgcgatgccgcccgcaagatgggcgtcccggtggggcccggacgtggatcggccgccggttcgatcatcgcctatctcaccgacatcatcgcgattgaccccctggagcacggcctgctgttcgagcggttcctgaatcccgagcgggtcaacccgcccgatatcgacctcgacttcgatgatcgccagcgtgacaaggtgatcgactatgtgacccacaagtatggcgaggaatacaccagccaggtcaacaccttcaacaagatcaaggcaaaggctgccgtcaaggacgccaaccgcatcctgggctatcccttcagcctgggcgatcgcatcaccaaggccatgccaccggatgtgatgggcaagggggttccgctcaacaagctcttcgatgagagcaacgggcgctactcggagggccaggaattccgcaatctgtacaactctgaccccgatgtgaagcgcgttgtcgataccggtatgggtatcgagggcctgatccgtggatccggcgtgcatgcatgtgccttcatcctgtccagcgagaagctgctcaacctcgtgccgatgcacaagcgggacaaggacggcatgatcattgccggctttgcctacccgcagctcgaggaaatgggcctgatgaagatggacttcctcggcctgcgcaacctgggcatcatggatcattgcgtgaagaacatcaagcgcaaccgtggcgaggacgtcgacctgcagaaattgccgctggacgatgccgccacctatgagctgatggcccggggcgacaccctgggcgtcttccagctcgatggtggtgcgatgcgttcgctgctgcgtcagatggggcccacctgcttcgacgacatcatcgccgtgctcgccctttaccgtcccggtccgatgggtgccaatgcccacatcgagtacgccgaccgcaagaacggtcgccgtccgatcgtgccgatccatcccgaactcaaggatgacctggacgagatcctcgcacccacgtatcacctgatcgtctaccaggagcagatcatggcgatcgcgcgcaagctggcgggttacaccctgggtggtgcagacctgctgcggcgtgccatgggcaagaagaagaagtacatcctggacgagaacttcaagcccttccagaagggaatgcgcgacaacggctactccgatgagtcgatccaggctctgtgggatgtgatggttcccttcgccggctacgcattcaacaagtcacatgccaccggatatgccctggtgagctattggaccgcctatctcaaggcgaactatccggcagagtacggggctgccctgctcacctccgtgggtgacgacaaggacaagatggccctgtatctgtccgacatgcgcgcacaacgcatcaaggtgctggcccccgatgtgaatgcctcggagaaggaattcaccgccgttggcgaggacatccgcttcggcttgggcgcaatccgtaatgtcggcgattcggtggtcggggggatcgtcgaggctcgcaccgatcacgggccggcccacgacttctttgagttcctggacaatgtgccgctgtcggtgtgcaacaagcggtgcatcgaatcgctgatcaaggcgggtgccttcgattccatgggccattcacggcgggcgctcatggacgtcttcgagacggccgtggacggggtgatcgacctcaagcgcaaccaggccaacggacaggatgacctgttcggcgacctgggcgggggcgatgccgagtccgatcccgccatgaaccacacggttcccgatatccccgactgggacaagcgcaccaagctggcctttgagcgcgagatgctcggcctgtacgtctccgaccatccgctgcgggggttggagcatgtgctgtccgccgaacgcacgatcgggctgggacagatcgcggagcagggtgccgaggccgacggacatgtcgaggtgatctgcggcatgatcacccaggtgcagcgcaagcagacgaagaagggtgccttctgggcaatcatcgacgtcgaggacctggacgccagcatgcaggtgctcatcttcccgaaggtctacgaaacctgcctcacccaactgtcgcccgacacgatcgtgcggatccggggtcgggtggtcaacaaggatgagtcgctggagatgcaggccgacgagctgaccctgcccgacatccgccagtccagtggggggccggtgacgatcaggttgccgctggtgcgctgcacgccgccgatcgtcgccgagctgcggcaggtgctcaccgcccatcccggttccaccgaggtgcgggtgcagctggtggggcctcaatcggacaccgtgctgcgcgtgggtgacggcctgcgggtgacgaacgagcaaccgctggtggccgacctcaaggccctgctcggacccgcctccgtggccgtatagcctgagcacgatggccccgactgcccgtcgggtcgatcggggccagccatggtgagcgaagggaacgcgtgagtgagtgagtcggtggggacagcgcccgaggcgcccggaccagccgcgcgggatgccggcgggccgccgcccggggccgggccgtcgcgcggtcgggcgtggcttgcctcccgtcgtcgcgagctgcgcttcctggccctgttcgtggtcatctgcgcggtggccggtgccgtctgcgcggtgatctggaagctcaccgccccggtgccgacgatcacagtgtcaaacgacggcagcgccgcggtgagcaaccaggcgctgtcggagttcttcggcgccgacgcggacttcatgatcatcggcatgttcggcggtgttgcgctgggcacactcgcctggcattggttcaagggctggggctggccggtggccatggtcgcgatcgtcgggtccgcccttgctgccctgatcacctggcggctcggcaccttgttggggccccatgacttcgccggacggctcgccggggcgtccgggggggcaacgatccccattgacctcaccctgcgttcggccacggcctggctgctgtggccattcggtgcaaccgttccggtgttgctctacagcgcgctgggtcgcgacgaggagaaggacgagcaccaggcggccgatcacgaccaggacgccgttggtgcccgggaggcccccggcccgaagcctgccaccggcctcacccgcagcggacatcgcctgatccgcttcccggcattcggcaggcactgagccccggccgggctcccggtgctgcccggcggtgcctcagctccagtggagtcccggcctggaaatggtgcccagccggccgtgggtcgcgcgcaccaggtcatcgggggccatctccacgctcagcccgcgacgcccccctgacacgaagatggtcggcgccgccgcggccgactggtcgatgatcaccggcgtctggcgcttctgacccagcggggagatcccgccccgcacgaacccggtcacccgctgcgccaccgcgggatcggccagcgccgcccgcttggccttggacaaggcggcgatctgcttgaggtcgaggtggttgtcggcagggatcacggccgtcaccaggggctccggccccgacgtcagctcgaccaccagggtcttgaagacccgtgccggatcgacgtgcagcgccgcggcggcctcctcgccgaaatagcgtgagcgcgggtcatggacgtaggggtgcagcgtatggggcagccccgtgcgggccagcgccaccgtggcgggagtaccggttgacttgttcgcagacttcgacatccctgaacgattccttggtgggcggacactgatcggcgggtccggtcaggtgaccaaccccacgataacgacccccaccggggccagaacgagggccggcaccatctcggcgaccgcaagccgtgcgatcccggccagccgcaggccgagcgccatcaggatgatcccgccggtcgcgtccaggacgttcaactcggcggggggcaacagtccacccagccaccagccgagcacggtcagcaggccctggtagaccagcaccaccgcggcgccgccggccaccgcgaaaccgaagctcgccgacaacgccagtgccgtgaagccgtccaggatcgccttgacgatcaactggtcattgccctggcccaggccgtcctgcagcgatccgaggatccccatggggccgatgcagaacacgagcgtcgcggtgacgaatccctcgaccgaccgcgaggtcagtgtcgtccctgccgggcggccacggttgaacgtcgagcgggcccattcacccaactgctcgatgcgctgctccaggcgccaccaggcgccgagcatcgtgccgatgaccagcgcgagcaacacgatgaccacgccggcctgtcccactgcgcgcggcaccgatgcgtcgaggagcgaggggatcgacaggccgccgatggtcacgaccaccagcccgagcacgggggtgaccgcatcgcgcacccgcgaggggaggtgctcgccgaacaaggtgccgaccgcggcccccacgacgatgcacagggcattgatgacggtgccggcaccgaggaagagctgtgcggggatcacacaggtattccaccaccagtggcacccgggggccatgtggggccctcgtggcgcccttgacgtgccggcggacgtcgccgaggggcttgtgtgcgcgccgataggatggcgccgtgttgcgaatgattgatgtcaccggccaacgactcgacgactacaccgcggttctgccgcgcggccacttcgacgtcgagcatgccgtggcagccgtcgaaccgatctgccgggccgtcgccgaggagggcgagaccgcgctgcgtcgctttgccgagcaattcgaccatgtggtccccgagcagctccgcgtgcccgaggaagcgctttaccgggccctggacgacctggagcccggattgcgggcagccatcgaggagtccattcgccgccgtcgcgaggtggcccgggggatcgagaccgaggaggccttccgggagatcgaggtggcgccgggtgcccgcgtcgccaaccggctcgtaccggtgggccgggtcgggctgtacgttcccggagggcttgcaccgctcgcctccacggtgttgatgaacgtggttcccgcccaggtggccggcgtgcagtcgatcgccgtggccacgccgccacaggccgagttcggcggccttccccaccccacgatcctggccgtgtgccggctcctgggggttacggaggtctacgcggtcggtggtgcgcaggccgtcgcgatgttcgcctacggggtgccgggcctgtgtcgcagggccgacatggtcaccggaccgggaaatatctatgtcgtggcggccaagcgcctgctgcgcggacggatcggcatcgatgccgaggccggtcccaccgagatcctcgtgctggccgatgaccgggcgaatccggcctatgtggccgccgacctgatcagccaggccgagcacgatccgatggccggcgcagtactggtcaccgactcgagcgccctgctcacccgggtcgaggaggagttggccgaccaggtcgagcggctcgccacccgggaccgcctgaaggtctcactgaccggtgagcagtcaggcgtggtgctggtggccgacatggaccagggcatcgatgtggtcaatgactacgctccggagcacctggagatccagaccgtcgatgctgcggcgctggcccagcgcgtgcgttcggccggggcagtgttcgtgggctcccattccccggtgccgttgggcgactattcggccggctcgacgcacgtcctgccgaccgggggagcggcacacttctcgtccggattgaccacccgcagcttcctcaaggcgatgcatatcatcgactactcggcgcaggcgctcggcgccatcggcgacgccgtcaaacagttcgcgcacgccgagcacctgcccggccacgccgaggccattgcggtacgcaccggacgagaggtcgaatgatgagcgcagcaccgcgcgatccgcgcaccacccagctccaggcctcggccgtgccgggcccggagatctcgctcgccgaactgccattgcgtcccgaactggtgggtgaggagccctatggcgccccccagctcgacgttccggtggcactcaacaccaacgagaacccctactcgcccagcgtgctggtgcgggcacagatggctgctgccatcgaaagggtcgcccgcaccctcaaccgctatcccgaccgggaggcccttgagctgcgcgccgatctggccaagtacctcggtttcggcctgcacgcccgcaacatctgggtcgccaacggatccaacgaggtgatgacccatgtgttgtcggcgttcggtgggccggggcgcaccgtcctgaccttcacccccacctactcgatgtatccggaatacgcgcgcaatacgcacacgaactatgtgacggtgccgcgcaagcccgacttcaccctcgacagtgagctcgtgctgcaggcggtggcagagcaccatcccgatgtcatcctgatcaccaccccgaacaatcccaccggaaccctcacgccggtcaaggtggtggaggagatcctggagcgcaccgacgcgctggtcgtggtcgatgaggcctaccaggagttcaccgagttccccgaggactcggctctggccctgttgccgcgcttcggacgactcatcgtgagtcgcaccatgagcaaggccttcgccctggccggtgggcgggtcggatacctggcggcagcgcccgccgtcgtcgatgcctgccggatcgtgcgcctgccgtaccacctttccgcccagacccaggccattgcccgggtcgcgctggcgaacaagtcggaattgctggcccaggtggacgagctgcgccaggcctgccaggaccttcaggactggctgcgccgcaccgggttggacgtggtgccgagccaggcgaacttctgcctgttcggccgcttcgtcgaccgccatgcggtatggcaggccctgctggacgaaggggtcctggtgcgcgagaccgggccggagggcttcctgagggtcagcgccggaacccccgaggagatggccgccttccgcgccgcgctggggcccatcatcatccaccagggggttctcgccccgggcctgatggcccgggtgaagcccgagggccccgcaaagcttccgaagggaatgaagaaatgagtcgttccgcggccatccatcgcgtcacctccgaatccgatgtgagcgtcgagcttgacctcgacggcaccgggtcatcccagatctccacgggcgtgggcttctacgaccacatgctcacgtccttctcgaagcactcactgatcgacctgacggtgcgtaccacgggcgatatccagatcgacggccaccactcgatcgaggacactgccatcgcgatcggccaggccctcggcgaggcgctgggcgacaagcgtggcatccgtcgcttcggcgacgccatcgtgccgctcgatgaggcgctcgcacaggcagtggtcgacgtcgcggggcgtccctatgtggtgtgcagcggcgagcccgactcacagatcaccgtccgcatcggtggcaccgagccgttgtatccgggatcgatgacctatcacgtgatcgagtcgctggcctccaacgccggactgtgcgtgcacctgaagctcctcgccggacgcgaaccgcatcacatcgtggaggccgagttcaaggccctggcgcgcgccctgcggatggccgtcgaacctgatccccgggtgagcggggtcccgagcaccaagggcctgctatgaccggtcccacgttggcccccggggcgttgcgtgaacccggggcacttgccgcgtcccccagcgtgggggtgctcgactacggctccgggaacctccattcggccgtgcgggccctggccgcggccggggccagggtcaccctgagcagcagccgcgcggagctggaagcctgcgaacgactcgtcgtgccgggtgttggtgcctttgcggcctgcatggaacagctcaggtcggtgggtggggtcgagctggtccgtgactgggcggcctcgggccgtccgctgctgggcatctgcgtgggtcaccaggtcttcttccgccacggcgtggaaaagggcatcagctccgaggggatcggcatctaccacggcacggtcgagatgctcgacgccgtgcggctgccgcacatgggctggaacaccgtggagccgccagccgacagcaggctcttcgcgggggtcggggacaagcgcttctacttcgtccactcctatgcaagtcacgccgtcgaacagcccggcgcgatggtcacctggtgcgagcacggcggtgaccggttcgtggccggtgtcgaatggcgcaatgtctgctccacgcagttccacccggaaaagtcgggcgcggccggagcacgactgctggccaactggctggccatgtcgcccgcggcttgagcgggcgtcgcggcatcgcgcggcggggcagtagggtcccgcccgtcccggtgagctagggtttcggcgtgaccaccgcactgacgatcctgcctgccgttgatgtccagaacggacaggcggtgcaattggtacaaggtgttgccggcaccgagaaggtgttcggcgacccgcatcaggcagccaagcgatgggccgagcagggggcttcctggctgcacctggtcgatcttgatgcggccttcgggcggggttcgaatgccgaactcctggccgaggtgatcgccggagtcgacctcaacgtggaactgtcgggtggaattcgcgacgacgcgagcctggagcgtgcgctgtcgaccggctgcaagcgcgtcaacatcggcaccgccgccctggagaacccgcagtggtgccgcaaggtcattgccgcctacggcgagcggatcgcgatcggcctggacgtcaagggcacgaagctcgcggcgcggggctggacccgcgagggcggtgacctgttcgagaccatctcggcgatggacgaggccgggtgccagcgctatgtggtcaccgatgtggccagtgacggcatgctcaccggcccgaatgtgacgctgctcaggcaggtctgcgagcacacggacgctgcggtcgtcgcctccggcggcgtcggttccctggacgatgtcaagacgctgcggaccctggttcccgaaggcgtcgagggagtcatcatcggcaccgccctctacctcggcaaggtcaagttgcccgaggccctggcggcggcgcgatgacgccggaatgggctgaggcgttcgtcgacgacgtcctcgaatggagtttcatgggcttcgacgacctcgaggaggtcgccgaactgcgtgccgcgatcgaatactttgacgatcccgtgcagaccatcagctatgccgacttcgtcgcggcgtggaaccggccgggggcccacgcaagccatcatgcggtggtcggccgcgaacgcagtggcagcatcgtctcctacgggtggaaccatccgggactgcccacggacgccaatccctcggtgtggttcgacatcggcgtgcatccggcgtggcgccaccaggggattcgccacagactgacgatgtggttgatcggacgcgcgcagcagtggtgggaacatattcgcaccgcgcagaccggtgccctgtgggtcggcacgacggttgacgagaagcgtggcggactcacccgctcgatgatcgaggccgggctcaccccgcagcgctggttcttcgacatgcatcgtcccctggaggcgggggattccctgccgccgctgccgaagctgaccgatgtctccatcgtgcccttcgatgactcactcagcgagctggtgcgccaggcccacaacgaggccatggccacgcggccgggatcgagcccggtgagtgcccaggcatgggaatcgtcgatcaacaaccatccggagaactcacaactgtcctgggtggccctggtcaaccgtgacactcccgcccacgagggcgcggcacacggtcgggtggtcggctatgcaatgaacctggcctatgacgacgagaccagtgaggggtggaccgagcggcttggcgtgtgcccgtggtgccgcaagaagggcattggtcgtgcgctggtgatcgcctcgatgcgtggatttgccggcgccggcctgaccagcgccggcgtgggggtcgacacggaagaccccaataccgcagcccgcttcttcggggttctgggcttcgaggagaccgagcgcgtggtggtgtatggacgtactttcagggtcgaacagccggactgaccggccttgtccccggcaggccggcatggtcggggaggttcgtgtaggggcgccgctgggcacagatgacccggagccggcgctgtcggtagaatcgtgatgttgtcgcgccgcccgacagggtgttgcgtgttgcacatctgaggaagaagggttcgggtagatgagcggtcattccaagtgggccacgaccaagcacaagaaggctgcgattgacgccaagcgcggcaagctgttcgccaaactggtgaagaacgtcgaagtctcggcccgcgtgggtggcggcgacccatccggaaacccgacgctgttcgacgcgatccagaaggccaagaagaactcggtgcccaatgacaacatcgatcgcgccgtcaagcgcggttccggtgagggcgctgacgcggtcagctacgaagacatcatgtacgaggcctatggccccgacggcgtggccatcctcatcgactgcctcaccgacaaccgcaaccgcgccattgccgacgtgcgcaccacgatcacccgcaacggggccacactggccgacggcggctcggtgcgtcggctcttcgagcgcaagggcgtcgtgcgggtccccaagacctgggaggtcgaggagggccgcaagtcggtcgagaagagcgttgacgaggaccagttgatggaagccaccatcgacgcccccgtggagaacatcgaggaccagggcgaggggttcgagatcacctgcgatcccaatgacctggtcgaggtgcgcaagtccgtccaggccgccggcatcgactacgagtcggccgaggtggccttcgtgcccagcttcacccaggcggtggacgacctcgaggtcgcccagaagatcgagaagctggtcgacctgctcgacgacctcgacgacgtgcaggaggtctacaccaacgccgagtacagcgaggcggtcgagaagggcctcgaggaagctgacgactagtccctgacagggcccgtacgggtccctgcaaccacgccggccccgggatgcgtcccggggccggcgtgtctgttgtcccggcgtgtctgttgtcccaggtgggcatctggccctaggctgtcgaacagttgttcggataggccgccggtggccggatcgacgcacggctcgtggcgcgggtccgcagcccgggagcccggccggggcgaacgggtgggggtcattgtcgggtgtggatcattggaatgggggcactggagtgcgcgtaataggcgttgacccgggcctgacgcgttgcggtgtcggaattgtcgacggaacccccggcgcgcgtccccagttcgtggccgtgggcgtcatccgcaccgatccgcacaccgagcacgcctatcggctgctggccattgaagagggcctgggggagtggttcgaccactaccagccgcaggcgatctccatcgaacgtgtcttcgcccaacacaatctcagcaccgtgacggggatcgggcaggtcgccggcatcgccatgatgctcggcgcgcgccatggcattgacgtggccctccacacgcccagcgaggtcaagagcgccgtgaccggttccggtcgggccgacaaagcccaggtgggcgtgatggtggcccaggtgctccacctcgccaaggcgcccacgcccgccgacgcagccgatgccctggccctggcggtcacccacctgtggcggggcagcgcccagaaccgctatgcgaccgctgccctgcagggtcgttcgtccgccgccgtggcgcgcgcccgccgatcggcggccattgcccgcgccgcgcggtcacgcaccgagcggcaggcatccagtactcgtggaacccgggggagttcgtgatcgcacagttgcacggaaaagttgccgccatcggcgcaaactggctggtcatcgatgtggccggggtcggcttccaggtgtccaccaccccgaacacgacctctgccctgcgcaccggccagacggccaccgtgttcacgagcctggtcgtgcgcgaggatgccatgaagctctatggcttcggcggcaccgacgagcgtgattgcttcgagctgtgtcgcaccgcctcgggagtgggtcccaagctcgccctggcgatcgtcagcgtgctgacgcccgaggagttcgccacggcagtgcgtacggaggacctcccacgactgtgcaccgttccgggaatcggccggaagggggcccagaagatcgtcatcgagctgaaggaccgggtggatgcgctgttcgtggcgcccactaacggctcggcgagcgtggcgccggtcaccccggcctggcaggagcaggtgatggcgggactggagagcctcggctggtcgagcagggatgccgaggcggcctgcgagaccgtggcacccctcgccgaggaggatcccgaggcgacggtggccgcactcatgaaggcggcgctcgcgtcactggccagggtgtgaggggccggaccggaacaatggtgtcgatgtcgttttcacactcccccctaggcttgggtcatcatggaacactctgcggttgatccctggccagagcccgaggaacgggccgccgaagcggccctccggccctccaccctggaggagttcgagggccagccgcgggtcagcgatcagctgggcttggtgttgtcggccgccaagcatcgcggcaccacgcctgaccacgtcctcctgtcgggcccgcccggactgggcaagaccaccctggcaatgatcatcgcctccgagatgggcgtgccactgcacatcacctccggcccggcgatccagcaccccggcgacctggccgccatcctgtcgggcctggtcgagggggaggtcctgttcctcgacgagatccatcgcatgtcgcgtccggccgaggagatgctctacctggcgatggaggacttccgggtggatgtcgtcgtcggcaaggggcccggggccaccgccatcccgatcgagatcccggccttcacgctggtgggggccacgacgcgtgtcggcctgttgcccagcccgctgcgtgaccgcttcgggttcaccggcaacctggacttctatgaggtcgacgacctgcaatcgatcgtcacgcggtcctcggccatgctgggggtcgggctcgacgaggcctcggcccacgagatcgccagccgttcgcgtggcacgccccgcatcgcgaaccgcctgctgcgccgggtgcgggactacgcccaggtgaacaaccagggcagggtcgacctggcactgacccgggccgccctggagctctatgaggtggacccgctcggcctggatcgcctcgaccgggcggtcctggaggccatctgcaccaagttcggtggggggccggtgggcctttcgaccctggcgatctcggtggctgaggaggccgagaccgtccaggaggtggcggagcctttcctggtgcggttgggtttcctgatgcgcacgccgcgcggacgggtggccaccgaggcgggctggcgccatctcgggctcacgccacccagcagcggtgacaaccctgatctgttcacctgaggcccgcggtcccatccggccccggtgtgggataagaggatcacacccggagccgctagactccttggggcatgccatctgggcacgcctgatgaggtgaggacgactgcatgaacggcccatatctgatcatcgccttcgttgcgttgatcgccctgttctatttcatgacgatcaggccgcaacgcaagcaggctgagaagcagcgcgagatgcacaacgccatcgagcccggcacgcgcgtcatgctgaccagtgggatctatggaaccgtcacggcaatcggcgacaagcagttcgtcctggaacttgccccgggcgttgacatcacggtgctgaagcaggcgatcgtgcgggtcgtgcagcccgatgacgaagaattcgagttcgctgatcccggcgtcgagatcagccggggcgatgacgagcagggcgaccatgagctggagccgggcgcttcatccaccgactcggtgaccgatgcgcccgcagccgggcaggctgccccgtccgacacctcgcatgacgacgccagcacggccgatcccgggaatccctcgagcgaccacgagcccggcactgacaacaagtcggctgacgccgagcagaagtagaaccccctccaggagaagtctcggcacatggccgccagcaatcgaaacaagcacacacatccgggtaggcgattgatcgtcttcgccctggtgatcgttttcctctacggattgatgggtctcacgaagacctggaccccgcggttgggcctcgaccttcggggcggcaccacgatcaccctcacggcgcgcaacaattccgatggttcggcgcccagcaaggacaatctcgagaccgcccgatcgatcatccagaagcgcgtcgacgcgctgggtgtcggcgagagctcggtgaccgtccagggcgaccggcagatcgaggtcgccgtgccgaatgtgagcagcgacgagctggtgagcctggtcggcaccaccgcccaactgggcttccgcgatgtttactcggtcacccagtcgagcggtgccgcctccggctccagctcctccagcccggccgccaccagcaatcccaccgatgtgtccacggcgctcccctcctcgccagcgcccaaggcaactccgcgggccagtggtgactccacgggtgctgccgacttcgattcggccctcaagtggacgcccagcgcccaggacagcaccgatttcgcggcatggaactgtggtgagcccgagaacgtggcacccgatcagccgctgttcgcctgcgatgagcagggccagctgaagtacctgctcggtcctgagctgatcaacggccaacgcatcacagattccagtgcggccatcccgcagggcgaagtcgcctgggtggtcacgatgaagttcgacggcaccggggcagaccagttccagaaggccaccacccagctcgccacgcagtcgtcgccgaagaaccagttcgccatcgtgcttgacggcaaggtcgtctcggcaccctcggtgtccacggccatcagcggcggcaatgccgagatcaacggcgccaacatcaatgagacgagcgccaaggagctggccaaccagctcaagttcggcgcgctgccggtcagcttcgatgtctccagcgtcgacgccgtgtcggcgagtctgggcgacgaacagctgcaggccggcctcattgccggcctgatcggcctgatcctcgtgctggcctacagcttcttctactaccgcggactgggcatcgtcgtggtcggttccctgttggccgcggtgatcatcacctggggcaccatcgtcctgctcggccagaccgtcggcttcgccatgaacctgcccggcattgccggcgcgatcgtcgccatcggcgtcaccgcggactcgttcatcgtgtacttcgaacggatccgcgacgagatccgcgacggacactcgttgcgccactccatccagagtggttggaacaaggcgcgcggcaccatcgtgatggccgactccgtgcagctgctcagcgccgtcgtgctgttcatcctggccatcggcgccgtcaagggcttcgccttcaccctgggcgtgaccaccgccatcgacctgttcatcgtgttcttcttcacccatccgctggtgaccctgctgggacgcacgaagttcttcggtgagggtcaccgcttctccggcttcgagcccgagcacctcggtgtcagccgggcctcgctgatcggacgcaggcgtgcacgttcccgttccgggcggcggacctccgggtcgtcgcgcaccgggagcgacacggatgccccgggcgacgacgagggcgacaagccagccagtggaagcaaggagtcctgatgtccgaatccaccagcacgcttgatcggccggccgaccatggcaccgacaaggcccgcaagggcaagtacaccgggaacttcgcccaccggctctacaccggtgagttcgagttcaacttcgtcgcccggcgcaagctgtggtactcgatctcgatcgtcctgatcgtcatctccctggcggcgttgctgttccgcggactgaacctcggcatcgagttcaagggcggctcggtgttcaccgtcccggtgagctcgacgagttcgcagccggtcgaccaggtgcgcaaggccgtcgacgagtcgaaggtgcccgacctcaccggcgcccaggccaccgccgtcggcaccggcacggtgcgcgtgcaggtgcgcagcctgtccaccgacgaggtcacccagatgcgtgacgccctggcctccaccgtcaacaccacgcccgacaaggtcggctattcactgatcggtccctcgtggggcggccagatcacgatgaaggccttccaggcgctgatcgtcttcctggtgttggtggcgctcatgatctgggccttcttccgggaatggagaatggccatatcggcgctggtcggcctgatccacgacctgatcgtgacggtcgggctgtatgcactgatcggcttcaccgtcacgccctccacgctcatcggcgtcctgacgatcctgggctattcgctctacgacaacgtcgtggtgttcgacaaggtccgcgagaacacggtggacatcaccaagcaggatcgcaccttctccgaggcggcgaacgctgccgtcaaccaggtgctcgtccggtcgatcaacaccaccgtcatcggtgtcctgccggtgatcgcgctgctgatcgccggtgttggcttcctcggcggggacggacccctggccgacctgggcctggccctgctgatcggcatggtggcgggcgcctattcgtccatgttcattgccacgcccctgctcacccagctccgcgagcgcgaacccgacatgaagaagcacgtggcggcattggccaagcgtcgtgcccgggccgccgccgaaccgcagatccgggtctcggccaccacggtgcccggtggcgccacggtctccagcgtcgaggggaccgccgaccatgacgtctcggcgtccgcccacgagggtgggggcccgacggcccgccagatgcgtgatgtgggcgacgggcgggcacagcccgtacgcacgccgcgaagcaagcgaaagaagtgacgatgcgtcccgacccgcgcgtgacgcggatccattcactggtccgcacgattgccgacttcccgaagccgggcgtccaattccgcgacatcaccccgctgctggccgatcccgagggactggccgacacgatggcggtgctggtcgacatggcgcccgacgaggttgacgtggtcgccggcatcgactcgcgcggcttcctgttcggggcgccggtcgccgtggccatgggcacgggcttcgtgccggtgcgcaagccgggcaagctgcccggcccggtcttcgaggaggccttcgacctggagtatggttccagcacgctggccatccaccaggatgcgctgcggcccggtcagcgggtgttgttggtggacgatctgctcgccaccggtggcaccctcggggctgccgtgaagctgatcctgcgggagaaggcggtgctcacccacgtggagaccgtcatcgaactacccgacttgggtgggcgcgccaaactggagtcattgggtgtgacgagcttctcgtccatcctccagttctgatccgggcggttcccacaggccgactacggttgggctactgaacagaggtaggaggcctgcagatgccgagcgacggagtttacggaccctatgcgcgaagtgcggtgcctgccaccgacccgaacacgcccaccagggccgctgacgagcgcatcagtaccggcccggagcagccgcggctgcgcatgagggagcgcctggcccgattgggcggggtgaaggcaccccaatcggcggtgctcgaccccctcttctcggtggtgagggccacccatcccaaggcggacctgtcgatggtggagcgggcctaccgcaccgccgagcactaccactccggccagacgcgcatcagcggtgatccctacatcacccatccgctggccgtggcgacgatcctcgccgagctcggcatgaccgagcccaccctgtgcgctgcgctgttgcacgacaccgtggaggacaccagctacaccctggagcagctgcgggccgacttcggcgacacgatcgccgcgttggtcgacggggtcaccaagctcgacaaggtgcagtacggcgattcggccaaggccgagaccatccgcaagatggtgatcgccatgagccgcgacatccgcgtgctggtgatcaagctggccgaccggttgcacaatatgcgcaccctgggcttcctgcgtcccgataagcaacatcgcatcgctcgcgagaccctcgagatctatgcgccgcttgcccaccgcttgggcatgaatgcgatcaagtgggagttggaggacttgtgcttctccaccctgcagcccaaggtctacgacgagatcgtccgcctggtggccgaggccgccccgaagcgcgaacagcaattgcgcgaggtgatcgaccaggtgaaggtctacctggatgacgccaagctcaccgccaccgtctacgggcggccgaagcactactactcgatctaccagaagatggtggtgcgcggtcgtgacttcgaggacatctatgacctcgtgggactgcggatcctggtcgacacgacacgtgactgctacgctgccctcggcgtgatccacacccattggaaccccctgcccgggcgtttcaaggactacatcgcgatgccgaagtacaacatgtaccagtcgttgcacaccacggtgctcggcccgggcagccgacccgtcgagttccagatccgtacccacgagatgcatcgccgggccgaattcggtgtggccgcgcactggaagtacaaggaggaccccaacgcgcagggcggcaagatcgaccccgagggaaccgacctggcctgggtgcaccagctgaaccagtggaccaaggagcaggacgatcccgaggagttcctcgattcgttgcgcttcgagatccagaccagcgaggtctacgtcttcacgccgaagggcgatgtgctggcgcttccctcgggtgcgactccggtcgacctggcctatgccatccataccgaggtcggccaccggtgcatcggcgcgcgggtcaacggaaagctggcctcgctggagagccagctggccaacggcgacatcgtggagatcctcacctcgaaggctgagaacgccgggcccagccgcgactggttgaacttcgtggtgagcccgcgggccaagagcaagatccgtcagtacttcacccgcgagcgccgcgaggaggcgatcgatcagggcaaggatgagctggccaagcaactgcgcaagactggattgcccatgcaacgcctgctcacactggaacacctcagtgccgtggcggacagcttccggctcgcctccgtcgacgcgctctacgccgcgatcggcgaggggaacatcggcgctcccggcgtggtgcaacgactcatcggcaccgagggcggcctggacggtgccgccgacgagagcctcgaggagaccacggtgctgcccaagcggggcaccgtgcgccacaccgggcagggcaatcccggcatcgtcgtggagggcgaccccgacatgtgggtcaagctcgcgaagtgctgcaccccgatgcccggcgacgagatcctcggcttcgtcacgcgggagaacgggatctccgtgcaccgacgcgactgcacgaatgctgcgaacctgttgacccaccccgagcgcatcgtcgaggtctcgtgggcgccgaacagctcctcgggttatctggtgagcatccaggtggagaccctggaccgtccgggggtgctcgccgacatcacgcgcacgctggccgacgagcaggtgaacatctcctcggcgacggtggcggtctcgaagaaccagctggcgaagctcaagatgaccttcgagtcaaccgatcccacccatctgcaccacgtgatggccaccatccgcaaggtgccgggcgtctatgacgcctaccggatcaagcagtaaccgccggcgaccaaccagcgcacaccgatccggccccacaaccatggttgtggggccggatcggtgcttaacgcgtggtctcaggcgctgaactcgtcgagggccttctgggcctgctcaagccagctctggtaggtggtcaccgaatcgcgcagttccttggccttcttggcgtcgccgcgcgcatcggctgcctcggcctgaccaatgatcttctcgatctggctggtgaacatggcaacggtgtcggccgcacgttcgcgggcctccggatcggtgcgcttccattccttctcctcggcgcccttgatcgcctgctccagggcgcgcacacgggagtcaatgggacggatcgcattgcgggggacacgtccataggcgttgaacttcgccaggaactcccgcagctgggtgcgggccccggcaacgtcggtcaccggcagcagcgtcttctcggcctcatcgagcagggcctccttggcctgctgattcgccttgtattcctcgtcctgctcggcgaacaccgcgttgcgtgcctcgaagaaggtgtcctggaggccacggaaccgcttccacagcttctcgtcgacattgcggggtgccgccccggcggccttccaccgcgtcatgaggctggcgaactcccgggccgtctcgctccattcggtggaatcggccagctgttcggcctccgcgatgatctcctgcttgagcttcttggcctcgtcacgctgggcggcgttgcgggcgaactgcgtcttgcgacgcctggtgtacgtggtgcgggccgagctgaagcggtgccacagctcgtcgtcggtggtgcggtcgatgcgcggcagcgccttccacttctcgagcagttgacggaatcggtcgactccaccgcgccagtcactcccggcagccagcttctccgcctgggccaccatcgcttccttctgctgcttggtctcggcgtgctggcgggcgcgctcctccttgcgttcggccgactgggcctccagcaggggattcagcgagtcgaggctggccagcagcccgtccaggtcgcccaccgcattggcctcggggatcgacgtgcgcagcgcgttgagctgcttgcgtgcctcctccgggctcaaggactttgactgcacccgctgcttcagcaatgaggcctctgtctcaagggcctggaaacggcgaacgaagaatgccatggcctcatcggggcccacatcgggaacctgaccgactcggcgttcgccggcggatgtgatcacatagaccgttccatcggcgtcgacgcgtccgtgacttgtcggacctgcagtagtgctcatgcctcttatcttgcccgataggctggccaatgtgttcatcgcctacttcgtgaccggtgcctggcagtccaattgctatgtgatcgccgacgaggatgccggccttgccgtggccatcgacgtcggtatggacgccgcacggaccgtggaggaactgctcgcccagcgcgacttccagctggccgggatcctgctgacccatggccatatcgaccactgcgcccaggcggccgtcctggccgatgcgcaccaggccccggtgtgggtgcacccggccgaccgggaactgatgacccatcccgccgaggggctgtcgccgcagatggcgggccagctccatcaactgatcggtgatgccccactccatgagccgcgcgacctgcggaccttcgaggccggggtgccggtgcgctgtgccggcttcgagttcagcgtcaccccggcgccgggacacacccccggttcggtcctgctcggcctggagggcgacgagcacatgatcgtcttcaccggtgacgtgctgtttgccggtagcatcggacggtccgatttcccggggggtgacgaccacaccatgcgtgccgtgttgcgtgacgtcgtgtcgacactgcccccgcaggcccgggtgctgcccgggcacggtcccttcaccacggtggccgacgagctcgccacgaatccctatctcactgacgcctatctggaggtacagagctgatggctcgccccaagccgctgtcgggtttccccgaattccttccccgcgagaggctcatcgaactggaggtgctcgacaccctgcgcgagaccttcgagctgcatggcttctccaatgtcgagaccagggccgtggagccactgagccagctcagccgcaagggcgacatcaccaaagaggtctacacggtgagtcgcctgcacgccgacgagcacgacaagtccgagttggggctgcatttcgatctcacggtgccgttggcgcgctgggtgcttgagcatgcggggcacctcgaattccccttccgccgctatcagatccagaaggtctggcgcggcgagcgcccgcaggagggccgctaccgggaattcacccaggccgacatcgacatcgtcgggcgcggcgagctggccgcccaccacgacatcgaggctccgctggtgatgttggaggccctcgagaagctgcacgaccggatcgggctcccaccggtgctcatgcacgtgaacaaccgcaagctctcggagggcttctaccggggcctgggcgtcgaggacaccctgtcggtgctgcagatcgtggacaagtacgacaagatcggtgccgatgccaccgtcgagctgctcggctcggagctcggccttgacactgacaccgcccgtcgttgcgttgcgctggcgtcgatccactcactggacaccggcttcgtcgaccaggtgcgggccctgggcgtgagcgacccgctcctcgatgagggcctgtccgaactcgtgaccctgattgaggaggcgaatcggcgcgtccccggccgcatcatcgccgacctgagcatcgcccgcggcctcgactactacaccggcgccgtctacgagacccagctcgtgggccacgagtccatgggctcgatcagttccgggggacgctacgactcgctggccagcgacgggaagagcacctatccgggcgtggggatctccctgggggtcacccgcctcatcgccccgctcatcgcggccggcgaattcagcgtcacgcggtcggtgcccacctgcgtggtcgtcgccgtcgacagcgaggagacccgggagaccgccatggacgtggctgcggccctgcgtgcccgtggggtcagctgcgaggtggcgcccaaggccgacaagtacggcaagcagatccgctatgcggaccgtcgtggaatcccctatgtgtggttcggggggccgatcggggaagtgaaggacatccgctcgggtgaccagcagcccgccgacgcgaacatctggatgccaagccgcgacgacctgcgtccgggcgtgcacgcggccgagtgaggcctgtccgcaccgtgcccgcgagatgaccgtgccgcgagatggcggcccgggtcgctgaccgcgggcacacctacactcgaggtggatgtgcaagccatcgggaggcgaccatgacaaccacggccaagaacacggcaacctcggacccgcagggccacaggcgtcccgcccgcggtgcggcaccccgtgcccatcgtgcccggcacagcccggtggtgcgccatgaggtgttccagacctcactgatgagcgcactgctcgacggcatctatgacggcgacatgaccctggccgagctgctcggccacggcaacttcgggttgggcaccttcgaggcgctcgacggcgagatgatcattctcgactccgtgccctggcagttgcgcgtggacggctcggtgacccgggcgagcctcgaccagctgacgcccttcgccacggtcaccaatttcgtgcccagtatcagcgaggagatcaaggggcccctgacccgcgccgagctcagcgaactggtcgaccacctgggtgtctcggccaactacctgtacgggctgcgcatcaccggtgacttcgaatggatcaccacgcgcaccgtgcgtcgccagaagaggcccttccccccgatgtcgcagaccaccagcgacgagccggtggtgcgccagacgcagaccagcggtgtgatggccggattccgcacgccgttgttcgagcagggcatcaacgtggccgggtgccatgtgcactatgtcaacaatgaacacacccacggcggacatgtcgtggacttcgtcatgaactccgggctgatcgaggtctgcctcggcaccgatcttcgcgtgcggctgcccctgtcggaggccttccaggatgccgatctggcccccgacgacctcgacgagcaggtcagggcggccgaacaccactgacccgtgtcggcgctcgggcgggccggttgcggcaggactatcgttgtcgggcgtgtcaggcgtaaaaacctggcccacgcgtccccaggacgtgtgaaccgtcccccggctggttacattaaggccagggggtgtgcgtgtgggcaggtcgccctgcccgcagcgccttccgaatcagaagtcacttcgaggacaacggagttccagcatgggtattgccatcaagtacggcgcaatggttgacgatccgattgttgatgacgacgggaaactggccattcgcggcggcgcgggtgccctggtggagcgtctcctcaagatctatccgggtgcctgcctggtcggttatgaggatcgtcagtgcgacgggttcgagatgaagcgcgacatcaaccttgacgccgagaaggatctggtgatcaacctcgacgtgatggattcggtgggcgtcttccaggtgatgcaccgccacggcgcggagccgatgatcatgaacctccagtggctaccgccacgtcactaccaccacaaggtgaacttcgccgccatgggattgagctatgcactcttcccgaccctgtgctcgggggagcgcaccgctgccgaggtctcggagctcacccaccggtggaccatcccggcgcttgccaattcggcacagatcgcctggttccagcccggcatccgtgacgacctgctgcagccccgcgtggacaccgaggtacccgaggtgctgtatcccagcatccacctcgacgccgagaagcatccccagcagttcatgcagatcgtgaccgaggtcgccgcgaaggtgcccctccagatggtggcccggttggccccccgcgatctggtcagcctccaggcgatgcggatgtcgtcggcgaagtggaccaccgtgggcccgctgtcggccgaccgtgagggctactggggcaccctggcgcacaccaccgcgttcctgtcgaccgccacggccgaggcctacgggctggaggaactggaggccctcgtggccggggtcatcggcgtcatgccgaagctgccctgggccgaggtgctcgtcccgacggggtatccctacctctacaattccgacgccgaggccgcgatgatgctcgagaacgtgctgcgtgaccccaaggcggcccgtcgggccatcgatgagtccgccggtgggtccatcaaggactgggtgttcgccaagcacgcgcgcgccgccggcaacgaggccatcgagaaccaggtcaaggaatggttccccaaggcgctggaggactgaccacccccacatgtcgtgatgcggccgtcggctccctgcaggggccggcggccgcgccatgtggggcccggccaccagccggtccgggtgtcggcgccgacgtccggccggcgcccgcaacaagaaatcgatcggcgatcgtggaagaatgccacaggcccgagcactgtctatgccggggcaagaagggaatatcaccgtgatccgaacccacgatgcgggaacgctgcgcgcctccaatgagggcgaaaccgtcacactggccggctgggtggcccaccgccgagatcatgggggagtggccttcatcgacctgcgcgacgccagcggcgttgcccaggtggtcatccgcgatgaggtgctcgcttcctcgggagcccacgacctgcgcaatgaatactgcatcgccgtcaccggcgtcatcgagcaccggccgcagggcaatgagaaccccgagatgcccaccggagacatcgaggtgaacatctccgacctcgaggtgctcaacgccgccgccccgctgcccttcccggtcgacgaatacaccaacgtcggcgaggacacgcgcctgcgctaccgctacctcgacctgcgtcgtccccgcatgcacgatgccctggtgttgcgctcgcatgtcacccacgccatccggggggtcctggagggacgcgacttctacgacatcgagaccccgaccctgacgcggtcgacccccgagggtgcccgcgacttcctcgtgccggcacgcctgtcgcccggatcgtggtacgcgctgccccagagcccccagctgttcaagcagctgctcatggtggccggcatggagcgctactaccagatcgcgcgctgctaccgcgacgaggacttccgggccgatcgccagcccgagttcacccagctcgacgtcgagatgagcttcgtcgaccaggacgatgtgatggccctgggagaagaggtcatggctgcctgctggaagctggtcggtgtcgacctgccccgtcccatgaggcggatcacctggcatgaggccatggaccgctacggctcggacaagcccgacctgcgcttcgggaacgagatcaccgaggtcaccgacttcttcgccgacacccccttccgcgtcttccaggccccctacgtgggcgccgtcgtgatgcccgggggcgccgcgcaaccgcgccgccagttcgacgcctggcaggaatgggccaagcagcgcggtgccaggggactggcatacatcgtcgtgaccgattccggggagctcagcggaccggtcgcgaagaacatctccgacacggagaaggccggcatcgccgagaaggtgggtgccaagcccggcgacgccatcttcttcgccgccggcgcccgtacggccagccaggagctgttgggtgccgcccgcctggagatcggcgcccgctgcgagctctacgaccccaaggactgggcgttctgctgggtcgtcgacgccccgctgttcaagccgacctcggaggcggtcgccgagggcgatgtcgccgtgggggccggtgcctggacggcggtgcaccacgccttcacctcgcccaagcccgagagcatggacagcttcgacaccgaccccgggtcggccctgtcctatggctatgacttcgtctgcaacggcaacgaggtcggtggcggatccatccgtatccaccgccgcgatgtgcaggagcgtgtcttcaaggtgatgggcctgtcacaggaggaggcccagcagaagttcggcttcctgctggacgccttcaagttcggcgccccgccgcatggcggcattgccttcggcctggaccgcctcgtcatgctgctggggggcttcgacaccatccgtgacgtcattgccttcccgaagaccggcaacggcttcgacccgctgacccaggcacccgccccgatctcggcgcagcagcgccgggaggcgggcgtggatgccaagccggcccccaagaaggacggtgcctccgacaaggacggtgtgcccgaggagggcgccggggctgatctcgacaccagcgccgaatagtcgccacgacccctcgacagggcagggtccggaccaccacggtccgggccctgccctgtccggttgacgtgtccggttccgtgccccatgtcgggcaggggcgcacggcgataggcttcgaccgatgagtgaggaccttttcggcaaccccgtcgccgacccacacgggggtggaaccgctgccggcatcgggggttccctcggggacgccgtcaacccgtccgcacccctggcggtacgcctgcggccccgctcactcgacgagatcgtcgggcagcagcacctgctgggccccgggtcgcccctgcgccggctcgccgagggccacgcggccatgagcgtcttcctgtggggaccacccggagtcggcaagacgacgattgccgccgtggtctcccgggccaccaaccgccgcttcgtggaaatgtcggcggtcaccgccggggtcaaggatgtgcgccgtgagctcgacatcgcccggcgcgagttggcccgcggacgacccaccgtgttgttcgtcgacgaggtccaccgcttctccaaggcgcaacaggacgtgctcctgccggcggtggagaaccgcatcgtgacgctcatcgcggcgacgacggagaatccgtccttctcggtgatctcaccgctgttgtcccgctccttgttgctcaccctgaagcccctgaccgccgacgacatctcgatcctgctcgaccgggcactcaccgacgagcgcggcctgcgcacacccgagggcagggagtacacgctggacgaccaggcacgtgccgacctgctgaggctcgccggtggcgacgcccggcgcgcgctgacctacctggaggagtcggccgccggcgccagcgccgccgattcggccacgatcaccaccgactcggtggccagtgccgtcgatcgtgccgccgttcgctacgaccgggacggcgaccagcactacgacgtgatcagcgccttcatcaagtcggtgcgtggttccgacgtggatgccgccctgcactacctggcacgcatgatcaccgcgggggaggatccccgcttcatcgcccgccggctggtgatccttgccagcgaggacatcggcatggcggccccctcggtgttgcagaccgccgtggccgccgcccaggccgtgcaactgatcggcatgcccgaggcacagctcaacctggcccaggccaccatcgcggccgccaccgcacccaagtccaatgccgtctacctagccctgaccgcggccatgaacgacgtgcgggcgggcaagggcacgggagtgcccgcccacctgcgcgacgcccactatgcgacggcccaggactacggacacggggtcggataccgctatgcccacgactggccccatggcgtggcaccccagcagtaccttcccgacgatctggagggcaccagctactaccagccgaccgaccacggcaatgaggcggccatcggggagcggctggccacgattcgtgagatcctgcacgagcaggacgagccgggatccggcgcggcgtcgcgcggacccactggctgacacatcggtcgccagcaggtcgtcggcgcatccaccaacgaggaatagagggtcatgaggtcgaacaagctggtcgtcaccggtgccgggcacgtcggatcgcaggttctcaccgaggccctccacatgggcctgttcggcgagatcgccgtcatcgacacgaacgagtcggtcgcggtcggggaggcgctggattccctgcaggccacgggcgcaccacacatggcagccattgacgtgcactccgggggaattgaggactacaagaacgccgacgtggtgatctgcgccgccgggccgagcatcatccccgacccggacgatcccacgggtcgaccggatcgttcactggtcaccacggtgaattcgaaggtgatccgccaggtgatgggcgacatcgcctcccagacccgcgaggcgatcgtcatcctcatcaccaatccgctcgacacgatggtctacatcgccgagaacgaattcggttatccgcccgatcgtgtcttcggaaccggcaccatgctcgactccacccgcctgcgccagatcattgcggcccactgcatggttgctcccagcagcgtgcagggctacatgatgggtgagcacggcctcaccgcgttcccggtgctgagccgactcacggtggggggctaccgattcgacgagttgcccgcggtgttcccgatcaatccggacctgagcgccgatgacatccgcgaggaggtcgtgcaggccgcctacgacgtcttcaactcaaagggctggaccaatgcgggaatcgcccagtcggcggtgtcactggcccgcaccgtcatgctggacgaacgggcgatccacccggtctgctccaccctgcgtggtgaatacggccacctcgacgatgtcgcgctgtcgatgccgtgcatcatcggacgcaatggaatcgagcgtcgcctgccggtggaactcaatgcctgggagtccgcccacctcgagaccacgatcgcccagatcagggcgacgatggttgaggccggcaccccgcgcgtccggtagccgtgacccggcaccggccccgtagttgcgagcccgtcgcggtccgctggcgcgccgccccacatcggggagacgggccgggcgggggcgtgtccgcgcgctagtcttgaccagcggttcgcgcccggcgagccgactattgccatgcgcgggagaaatacatcatgaaagcagctgagatcggtcgccgtttcgtcgacttcttcgtgtcgaagggccataccgaggtgcccagcgcatccctgctctacaacgatccgacgctgctgttcgtcaacgctggcatggtgccgttcaagccatatctgatgggtgagctccccgcgccctggaagcgcgccacgagcatccagaagtgcgtgcgcaccctggacatcgaagaggtgggcaagaccacccggcacggcaccttcttccagatgctgggcaatttcagcttcggggactacttcaagaaggaggccatcgagttcgcctgggagctcgtcaccggccccctggcggagggacgcctcggtttcgatccgaacatggtgtgggtcaccgtgctgggtccgggattccatcccgactatcccgagggtgacacggaggcacgtgatacctggctgtcactgggcgtgccgcccgagcacatccagggccgtggactgaaggacaactactggcacatgggcgttcccggcccgggtggcccctgttccgagatctacatcgaccgtggccccaagtacggcgccgagggcggcccggaggccgacgaggatcgcttcctggagatctggaacctggtcttcgagaccgaggagctcagcaccgtgcgctccaaggaggatttcgacatcgccgggccgatgaagacccgcaacatcgacaccggcgccggcctcgagcgcatcgccctgctcatgcagggcgtggacaacatgtacgagaccgacgaggtcttcccggtgatcgagcgggccgccgcgatggccggcaagcgctacggcgccgatcacaccgacgacgtgcgtctgcgcgtggtgggcgaccacgtgcgttcctccctgatgctgatgaccgacggggtgaccccgggcaatgaggcccgcggctatgtcctgcgacgcctgatgcgccgcacgatccgctccatgcggttgttgggggtcgagaaggtctcgctcaccgaactgctcgacgtcagtcgtcagtgcatgcatgccacctaccccgagatcgacgaccagtgggagcgcatcaaggacatcgccgacaacgagtcggagagcttcgagcgcacgctcaactcgggcacccaattgttcgacatggcagtggccgaggcacgtgcggcgggttccaacgaactgggcggcgacaaggccttccagctgcatgacacctacggtttccccatcgacctcaccctcgagatggcctccgagcagggcctgcacgtcgatgagaccgccttccgcacgctgatggaccagcagaaggcacgcgccaaggccgacgcgaaggcgaagaagggcaatctgcaggacgccgagagctatcgcgaactgcgcgaccgtggtgagacacccttcgtgggctattccgagctgaccgtcccgaccagggtccgcggactcgtcgcggacggccacgtggtcgaccacctgcgggccgggcagcttggcgaggtcgtcctcgaggagacccccttctacgccgagatgggcggtcaggatgccgatgctggcgtgctgcggtcggacgcgggcgaattcgaggtcatcgacgtccaacgtccggtccccggcctcgtggtgcacaccgtgcgcgccggcggcgagctgcgccccggtgatgaggtgcaggcgatggttgacgcagtgcaccgccagggtgcatgccaggcccactcggcaacgcacatcatccatgcggcgctgcgcgaactggtgggacccacggccacccaggccgggtcgtacaacaagcccggctacctgcgcttcgatttcaattcctcccatggcctgtcggcggccctgaaggccgagatcgaggcccgctgcaacgcggcgatccgcgacgacctcgaggtgagcgccacgcagatgccgctggcgcaggccaagggcatgggcgccatggcgatgttcggggagaagtaccccgacatcgtgcgcgtcgtggagatgggcgggccctggagccgcgagctgtgcgccggaacgcatgtgctgcacgccagccagatcggcatgttgaacctgctcggcgagcagtcggtgggagccggcacccgccgtgtcgaggccctggtgagcaccgacgccttcgagcacatggcggccgagcgtgccctggtgaatcagctcaccgggacgctcaaggtgcagcccgaccagctgaccgaccgcgtgggcgccctgatcgaggagctcaaggtggcccagaagcagatcgcggagttgaaggcggcccaactgctggccggtgcaccgcagctggtgtcggatgccaaggacatgtggggtgtctcgttcgcctccaagcgctatcacgatgtcgacgccggcgcgctgcgcacgctggccggccaggtgagggaccaattcggtgaccggtcggccgtggtggccctggtcggcggctcggccaccaagccggcgctggtcgtggcaaccacccgggccgcgcgtgatcgcgggttgaacgccggcgcgttggtccgcgagggcgccggcgtgctgggcggcaatggcggtggcaagcctgacctcgcccagggcggcggcaccgatgccggcaaggccgacgaggcgctgcgcacggtggaatacgccattggccatgtcgtccagggctgaggaaccgatcgaccccgaccccggcccggagcacacctggcgccccggcgtcaggttgtgcctggactggggcaaggcccgcatcggggtcgccgcctgcgaccgtgacggcctgctggcctatccggtcgagacggtggcgaacggatcgggcacgatgaagcggttgaaggcgctggtggacgagtacgagcccttcgagatcatcatgggcatgcccaccgacctgcgcggtcggcaggggatcgccgcctcagccatgatcgacaacgcccgccgtgtcacgcgggcgttgcaccgcgacgtgcgattggtcgacgaacgactcaccacggccgccgcgacacgtaggctggctgcggcgggccgtgattcgcggcaccgtcgatcggtgattgaccaggcggccgcagtggccatcctggagcaggccatcgagatggaaaagagatccgggcacgcgccgggagaactggtgagtcacgagacggaggaatcgcaaggtggcgggacccaagcgggcggctgacgaggacgccgaggggccccatggcccggcggcatccggtggggaacaacctcccctcattacgatgacgcgggactaccaccgcacgccgggatcgtggctgaagtcggtgatcgccgtgctcgtgagcctggcggtgatcggcggtggtggcttcctgatctaccacaaggtcaccgaatatcagggcgccgattacaccggtgccgggcagagcgacgtcacggtgacggtgaagtcgggtgaatcggtgtcgcagatgggcgacctgctggtggccgaggacgtggtggcctcccgcaatgccttcatgcgcgccgccaagaaggagaagcgcaccaacaacatccaggccggcacctacaagatgaagacccggatgcccgcggccgacgtcgtcgcagtgctcgtcgatccgtcgaacatcgtcaacaatcgcttcacggttccggagggcctgcgcaacacccacgtgctggaacaggtgagctcggccaccggcatcgcgctgggacaactgaccgcggcctccaaggatccctcgctgccggtgccgtcctatgcccagggcagttccgagggcttcctgttccccgacacctacaccttcgagcccgacttcaccgcgtcccaggtgctgacccggatggtcgatcggttcaaccaggtggccgctgacgagaacctggagaagcgtgcggctgcggccggtcggtcgccccatgatgtgttggtggtggccagcattatcgagcgggagacctccgaccacaaatatgccccgctcgtggccgaggtgatctacaaccggctcgcccagggcatgcggctgcaatcggacgccacggttgcctacgccaacaacctggagggcaaggtcaccaccaccgacgaggagcgggggctcaactcgccctacaacacctacatggtcgacgggctcccgccgacgccgatctccaatcccggcaaggctgccatcgatgcggcgctggcgccggcgagcggcgactatctctacttcgtcacggtgaacctcgacacgggggagaccaagttcgcctcggattcggcgggtcacgaccagaacgtcaaggagttccagacctggtgccaggccaactcggatcactgcaagtagaacaacactgcaagtagaacaacactgcaagtagaagaacagggcacgcagcagaaccgggcagctcgaagaacagggcacctgggaaacccgacccggcgcgggccacggacgcgatcgcgggacgggcagcgcagctgggataatgggagccatgttgcgctatctcaccgctggtgaatcccacggccgtgccctcgtctcgacaatggacggcctgccggcccatgtgcgcatctccacggcagacctgcagaccgcactggcacgtcgccggctgggtgccgggcggggcgcccgcatgaagttcgaggccgatgaggtcacgatgctcgccggggtgcgccacggcgagacgctgggttccccgatcgccgtgatgatcggcaacacggaatggcccaagtgggaacaggtcatgagccccgatcaggtcgaccccgaggtcctggcctcgctggcgcgcaatgcgaagctcacccgtccgcgtccgggtcacgtcgacctcgccgggatgcagaaatacgactgggacgaggcgcgccccgtgctggaacgggcaagcgcccgcgagaccgcggcgcgggtggtgctgggtgaattcgccaagcagttcctggcccagggcttcggcatcaccgtgctcagccatgtggtgcagatcggtcaggtcagggcccacgtcgccgaaccgccgcggatggccgacctggcgcacatcgatgacgatccggtgcgctgcctcgaccgcgaggcgagcgctgccatgcaggccgagatcgagcagtgccgcaaggacggcgacaccctcggcggggtcgtcgaagtactcgcctggggctgcccgcccgggctgggctccatgcgtgagggggacacccgtctggacgcacggttggcgagcgccctgatgggcatccaggcgatcaagggcgtggagatcggcgacggcttcgacctcgcctcggtgcgcggcagtcaggcgcacgacgagatcgagcccgggccccacggcatccggcgcatcagtggtcgcgccgggggcaccgaggggggcatcagcaccggtgaggtgctgcgcgcccgcgccgccatgaagccgatcgccaccgttccccgcgccctgcgcaccctggacgtcaccaccggtgaggccacgaccgcccacaaccagcgctccgacgtctgtgcggtgcccgccgccggggtcgtcgcggaggcgatgatggcccttgtggtggcacaggcctgcctggagaagttcggcggcgactcgctgtccgagacgcggcgcaactacctggcgtacctcaagcgcctgcgcgatcgtggactgggcgtggccgaatccctatgagccacccaacgccacgaccccgcaagcagcccggggtcattcgacaggtcatcctcgtgggattgcccggcgtcggaaagaccacggtcgggcacctgctcgcccgccgacacggcctggacttcgtggatgtcgacgatttcctcgagcggcagcagggcatgaccgtggccgagatcttcgcccaacagggggagcaggccttccgtgacctcgaggcgcaggcaaccgccgaattgctcgacgacgcgggcgtcatcgcgctgggcgggggagcagtcgtcaaccccgtggtccgtggcgccctggccgggcgatgcgtggtctggttgaccgcctcggtggcacagggcgtggaacgtatcggccagacgacacaccgcccgctgatgcgcggcgatgtgtcctcgacccttgagcgactgcgccacgaacgagagcacttctatgcccaggtggctcgtcatcgggtcgataccgatgcacgccccgctggcgaggtggccgatcaggtggccgccctcgtcgggctcgatggagaggaagcacccatgaccgtcgcccatttcgccacggaccgtccctatgacgcccggatccgaccgggcgcgctcgacgacctcacaacccatctcgggggtgccacgaaggtggcgatcttcttccccgaggtcctgggtggggccgccgcgcgtgcatctgacgtggtgcgtgccgccggtgccgaacccaccatgatcgagctgcccgagggggagcaggccaagacgccggtcgtgctggccgactgctggggacggctggccgacgccggcctgacccgcaccgaccttgtcatcgggatcgggggcggcgccaccaccgacctggccggcttcgtggcggccacctggctgcggggcatccggtggatcagcgtcccgaccaccgtgctggcgatggttgacgccggcatcgggggaaagaccggggcagaccttccccaggggaagaacctgatcggagccttctgggaaccctcggtggtgctcgaggacaccgacctgctggtcggcctacccgcccgccaggtgcgcagcggcctggccgaggtgatcaagcacgggttcatcgccgacgaacgcacccttgagctcgtgagcggtgacccggcacaggcccaggacgtcaccagtgggcggctcgccgagctgattgcccgttcggtgcaggtgaaggcgcgcgtggtgtcatccgacctccgcgaatccacctcggtcggtgatgacgtcggacgcgagcagttgaactacggacacaccctgggccacgccatcgaggccgccgagcacttcaccaggccccacggggaatgcgtggcgctcggcatggtcttcgcagcggagctggcccaccgggtgatcgggctggacgaggccaccgtggcgcgtcatcgccgggtgctgggttcggtcgggctgcccaccagctaccacggggttgcctggccggcgctgcacgaactgatgatgcgggacaagaagacgcgtggctcggtgctgcgcttcgtcgggctgcgggcacagggcgagccgaccatcatcgtcgaccccgatccgcaggccctccggggcgcgtggcaggccctgaccgcaaccaccgactgaaccgtcaccggacccgtctgcaggggtccggtgaccggacgggggtccatgcccgtccgggccgatccgggtatcggtgacattcgggtagaatggctggtcgcggcctcatgccgcccatgatcaacggacgcagcggtgtccgagacccacccgccatgacgaaaggctgttacgtggcaacgacgaacgacatcaagaacggcacagtgctgaacctggatggtcagctgtggcaggtgctgtggttccagcaccacaagcccggcaagggcaataccgtcgttcgcaccaagatcaagaatgtgctcaacggcaaggtcgtcgaccgcaccttcccggcggataccaagatcgagatggcgcaggtcgaccgtcgcgacatgcagtacctctacgacgatcccagcggctatgtgttcatggacactgacaactacgagcagctgaccattcccgccgacgtgatcggtgatgacaaggactacctgctcgagggcatgatcgtcaccgtcgccaccaacgagggcacgccgctctacatcgacctgccggccagcgtggaactcgaggtcacctacaccgagcccggcctgcagggcgatcgctccaccggcggcaacaagcccgccaccgtggagaccggcaagaccgtgcaggtgccgctgttcatcaccaccggcgagaagatcaaggtcagcaccgacgacggtggctacctcggccgcgtgcagagctgatgagccaacccgacgacgagatcatcccgctggcacacggagagcaccccccggtgcccgacgcggtgaagatcgcgagcaccgacttcgcggaggcccaccactccacgcgcaccaaggcccgcaagcaggcgctcgacgtgctgttccaggccgacctgcgcaacgaggcggtccatcgcaccatggcgcggcgcaccgagcagggggagcccgcgctacgggacttcacccgacagatcctcgacggctattcggagcacggccacgagatcaacgagcacatcgatcgggccctgaccggtgactggaccctggagcgcatgtcgcgggtcgatcggaacctggcccggatcgccgtgtgggagctcgacttcaccacgatcgacctcaaggttgcgatcagcgaggccatggaactggccaacgagctgagcaacgacgaatcggtcaccttcctcaatggtctgctggcccgcatcgccgaagaacggccggccatcccgacggccccgggtgccgaggcccccgatgcgggacccgtcgaaccagccggtgacgcctctgccgagcccgctgacaacggcgcggtcgccgagcaggacagcgagaacatcggccaatgagccatggatgggttgacgtcgaggtgtcgatccatttccttttccggtccgttcgggccggcattctgcagaccacggatgagtctgggcgagcccggccggctgataagctcaacgacggatatccggcctcggcctgcgtactcaatcctgcccgtcggggcggggaaggacggtcatgagcgcgaacgacaacagcgcgatcttggttctcgaggacggcaggtgtttcaccggccgcgccttcggggccattggtgagactttcggcgaagcggtgttctccaccggcatgtccggttaccaggagaccctcaccgaccccagctactaccgacaggtggtcgtggcgacggcaccccatatcggcaacaccgggtggaacgacgaggatgacgaatcctcccgcatctgggtttcgggctatgtcgtgcgcgacccctcccggatgcccagcaactggcgttcggccaggccgctggatgaggagctggaggcccaggggatcgtcggcatctgcgacatcgacacccgcgccctgacccgacacctgcgcgagcggggtgccatgcgcgtcggcatcagttcggtggacaccgacgtggcgacgctgctcgcccgcgtccagggttccccccagatggcgggagccgacctggtgggctatgtcaccaccgacaagccctatgtggtgcccgcggtgggcgagaagaagttcaccgtggccgcgatcgacctggggatcaagcgcatgaccccccgtcgcatgacgcagcgcggcatggaggtgcacatgctgcccgccaccgcgacctgggccgacgtggtcgccaccggggctgacggattgttcttcagcaacgggccgggtgacccctcgacgctcacctcccccgtggagctgtgccgcacggcgctggccgagcagatgccactgttcggcatctgcctgggcaaccagatcttcggacgcgcgctgagtttcggcacctacaagctcaagtacggccaccgcgggatcaaccagccggtcctggaccgggccacgaaccgcatcgacatcaccgcccacaaccacggcttcgcggtggacgcgccgctcggcgaggacacgaccacgccgttcggtgaggtcgccgtgtcccacgtctgcctcaacgacgacgtggtcgagggcctcagcctgacgcgcgatgggtgcacccgggccttctcggtgcagtaccaccccgaggcggccgccggcccgcacgatgccagctatctgttcgaccgtttcgccgacatgatggccgcccatcgtggcgacgacccggcgatcaacacacatgtcaaccagagcaacgcgggagagcagaactgatgcccaagcgcaccgacatttcgtccatcctggtcattggttccggcccgatcgtcatcggccaggccgctgaattcgactattcgggcacgcaggcctgccgggtgctgcgcgaagagggctatcgcgtcatcctggtcaattccaacccggcaacgatcatgaccgatccggagttcgccgacgccacctatgtggagccgatcacccccgaattcgtcgagaaggtgatcgctgccgagaagcccgacgcgctcctggccaccctgggcgggcagacggccctcaacaccgccatctccctgcacgagaacggcgttctcgagaaatatggcgttgagctcatcggcgccaatgtcgatgcgatccagcgcggcgagaatcgtgagaagttcaaggagatcgtcgagaacctaggcgagttctccggttcgcgtccggaggtggcacgttcccacatctgccacagcgtggatgatgtgatggccgccgccaaggacctcggtttcccggtcgtcctgcggcccagctacacgatgggtggcgtggggtcgggcttcgccaacgaccccgacgagctcctgcagatggcccagatcgggctggatgccagccccgtcaccgaggtgctcgtcgaggagtccatcctgggctggaaggagttcgaactcgagctcatgcgcgacaagtccgacaatgtcgtgattgtctgctcgatcgagaacttcgaccccatgggcgtgcacaccggcgactcgatcaccgtggcgcccgcgatgaccctgaccgaccgcgaataccagcggatgcgtgatgtcggcattgcgatcatccgcgccgtgggggtcgataccggcggttgcaacatccaattcgccatcaaccccgccgacggtcgcatgatcgtcatcgagatgaacccccgcgtgtcacgctcctcggcgctggcgtcgaaggcaacgggcttcccgatcgccaagatcgccgccaaggtcgccgtgggctacacgctcgacgagattcccaacgacatcaccgagcagaccccggccagcttcgagccgacgctcgactacgtggtcgtgaaggttccccgcttcgcgttcgagaagttcccctacgccgacgcgaccctgaccacccacatgaagtcggtgggcgaggccatggccatcggccgggacttcaccgaggcactcaacaaggccctgcgctccacggagaagaatggtgggttctggaccatcgatgaccccagcgatggtgatctcgaccggctcctggccgacgtcgggcgcccccacgacggacgcgtgctcgaactcgagatcgccctgcgccggggagtcagcgtcgagcgcctgcacgagctcaccgggatcgatccctggttcctcgaccaggtgtcgatgatccacgagatcggtgagcaggtgcgcaatgcgccggagctcaccaaccagctgctgcgccacgccaagcgccacggcctgtcggacgcccagatcgccatcctgcgcaatgtgcccgagcaggaggtgcgccgggcccgctgggacgccggtatccgcccggtctacaagaccgtggacacctgcgccgccgagttcgcggcacgcacgccctatcactactcgagctacgacgaggagtccgaggtcctgccgcgcgagaagccggcagtgctcatcctgggctcgggccccaaccgcatcgggcaggggatcgaattcgactactcctgtgtgcacgccacccaggtggtctcccagcacggctatgagtcgatcatggtcaactgcaaccccgagacggtctcgaccgactacgacacctccgaccggctgtatttcgagccgctcaccatggaggacgtgctggagatctaccacgccgagagccaggccggcccgatcgccggtgtcatcgtgcagctcggcggccagacgcccctgcgcctgtcccagcagttggaggacgccggggtgaagatcgtcggcacctcgccggaggcgatcttcctggccgaggaccgcgaggccttcgagaaggtgctcgacgacgccggactgcctgcccccaagtacggcatggccaccagcttcaccgaggcgcatgcggtcgcagccgagatcggctatcccgtgctcgtgcgtcccagctatgtgctgggtgggcgcggcatggagatcgtctacgacgacgatgccctgcaggactacatcgagcgctccacgctgatcggaccggattccccggtactggtcgaccgcttcctcgatgacgcgatcgagatcgacgtcgacgcgctctacgacggccacgagctgtacctgggcggcatcatggagcacatcgaggaggccggcatccattccggtgattcggcgtgctcgcttccgcccgccaccctgggcgatgaggtcatcgaccggatccgcaccagtaccgaggcgattgccgccggcgtcggcgtgcggggactgatcaacatccagtacgccctggcctccgacacgctgtacgtgctcgaggccaacccgcgggccagccgcacggtgcccttcgtctcgaaggccaccaacacccagctcgccaaggccgcggccctgatcatgctgggttccacggtggcgcagctgcgtgaatccggaatgctccgcgacggtgtcgatggggccgagcggtggggagggatgccgatcgcggtcaaggaggccgtcatgccgttcaatcgcttcctcaccaagtcgggacgctccgtggataccttgttgggcccggagatgcgctccaccggcgaggtgatgggcattgaccacagcttcggcgtggccttcgccaaggcacaggacgccgtctacggggccctgccgacctcgggcaccgtcttcgtgtcagccgccaaccgtgacaagcgccacatcatcctgccgctcaaggaactgtccgacatgggcttcaccatcctcgcgacggcgggcacggccagcatgctgcggatgcacgacatgaacgtcaccacggtgcgcaagtactccgaggggcgcggccccgagggcgagccgacgatcgtggacctcatcgacgacgagaaggtcgacctgatcttcaacaccccgaccggtgagacccgcggtgggcggccgcgcggtgacggctatgagatccgcactgcagccatcctgcacggcgttccctccatcaccaccgtccagggcctcgaggccgctgtgcagggcattcatgccatcgagcgcggtgacatcggggtgcgttccctgcagagctggggcgccgacatggaccggcacctgcgcaactcacagcgcgagggctgagccggcggcgcggcaccaccgcgcccgaggccgcacgacgcccggacacaacaggaccccgagggaacaggaatggtcacgatgacgatcgacgagctgtatgtgcgcgcggtgcgtgccggctatgaaggcctggtgcgccccctgctgttcaccatgcacggcggtgatcccgagaagatccatggtcagttgatctcgaccatgggtcacctgccggactcgttggtggggctcatcgagcgattcatcgggcagggccgccagcccgtcgacgtggcgggtgtccatttcccggggcgtatcggcgtggcggcaggactggacaaggatggggtggcggcaggcatctggtcgccgctgggcttcggtttcgccgagctcggaacggtgaccgcccacgcacaaccgggcaacccgcggccgcgcctgttccggctgatccgctctggggcgatcatcaaccggatgggcttcaacaacaacggcgccgaggcgatggcggcgcgcatggcgaacctgggggttgcccgcggcaacaatgcactgggctgcccgatgggcatttcgatcgggaagaccaaggcgaccccgctggccgacgcggttgacgactatctgttcagcctgaccaccctcgcgccctatgcggactacgtggcactgaacgtctccagccccaatacgcccggcctgcgcagcctgcagggacgccacgagttggaggagctcaccggggccctggtggccagggcccgcgagctggacgctgacgatcccgtaccggtgttcgtcaaggtcgcacccgacctgaccaccggtcagctcgatggcatcctgtccagctgtgagcaggccggcattgccggcatcatcgccaccaatacgaccatcgaacgcgacggcatcaagggatccgatgcccggtatgcctcccaggccggaggcctgtccggttcgccgttgaccgcgatggcgctggaccgggtgcggtggatcaccgcccacaccgacctgcccgtgatgggctgtggcggcatcatgacgcccgccgacgcccaggcgatgttcgatgccggtgcccggctggtgcagctctacaccggattcatcttcgaggggcccgcactggtgatgggcatcaaccgactcacccgacccggcaagggggcccgcgcatgagcggcggtttcggggcgcgcctccaggccctggctgacgagcggggacgcctgtgcgtcggcctggatccccacgagcccctggtgcgggcctggggcctggactacgacgccgcgggcatcgaacgcctggcgcgcgacaccgtcgccgcgttggccgacgaggtgatggtcttcaagccgcaaagtgccttcttcgaggtgttcggatcgcgcggggtggcggcactgggtcgggtcctggacgacatccgcgccgccggggccctgtcgatcctcgacgtgaagcgcggtgacatcggctcgacgatgtccgcctacgcccgcgcatacctgtccgatgacgcggagttgcgcgccgatgcgatcaccctgagtccctacctgggattcgaggccctgcgccccgccatcgacctggcgcatgccaccggccggggcctgttcgtgctgtgccacaccagcaatccggagggtgaggaagtgcagttcgccacccatggcggacacaccatcgcccagggcgtggtcgaccacgcacaggctgagaacaccgagcacgggctggatgacatgggcctggtgatcggggcaacccatgacaacgcgggcgttgacctgtcggggttcaccggctggacgttggctcccggcatcggtgcccaggggggcacggtggagggattgtccgccattttcggtgccagtgcgcatcacgtcctcccgagctcctcgcggggagtactgcgggccggaccggatcgtcaggcgctgcaggaggccgcccgggcactcatcctgcactgagcgtttcggtagatttgttatctcttattcacattggctaattcgtaatctttttcgtcactttgagcctgcgtcccaattgcagtacattctccggtgtccgccccctggaccgcaggaactgttcgcggtcaggaccaaccaacaagtgatggagaagccgtggctatcccgacactgtcacccgaacaattgcactcagcccgttgcgcagcaacgctcgcccgtagggcccgcgccgatttcaagatgcgcgtacgccagggcaacctcaccctcagcgaggcactcgacctggccagctgcgatgacgtgctggcccacgtccgtgtgatcgacctactgaaggcgctccccagagttggcgacaagcgcgccgccggtatcatggagcgcctggacatcgcgtccaatcggcgggtgcgcggccttggtcgccaccagctggcaggcctcaagacggagtttcactgatcgatgaatgacaccgcactaagcgcccgggaacatcaacccgaggctgtcccacgggcgaatggtgcggagcggctcagccctcgcgtctatgtgatctccggcccgacggccgtcggtaaggggaccatcgtcgagcggctgcgccgaattcatcccgagatcttcgtttcctgttccgccaccacgcgcaaaccgcgtccgggtgaagtcgatggggtgtcgtactacttccttgacgacgcccagttcgacgagctggtcacctccggcgggctcctggagtgggccggtgtgcatggcgaccgctacggtacgccgcgcgagcccgttgagcgcgcgctgcgcgaagggcgtccggtgatcctcgagatcgacctgcagggtgcccgccaggtgcggcacagctatccccaggccgtcgagatcttcctggcccctcccagctgggaggagctggtgcaccggctccgtggacggggcaccgagaaccaggaccagcagagccgtcggctcaggaccgcccgccacgaactcgacgccgaggatgagttcgaccatgtcgtggtcaatagggagatcggaacgacggtgcgcgagatggtagacttaatgaggttgtgagcccagcggctcgaccattccattctgcccagtgattcccatcgccctgtggcgacaagatgaggttcaacttgaccagcactgcttccatccgctccagctccgaaggcatcatcaacccgcccgttgatgagctgctcgagcacgtcgattcgaagtaccgcctggtgctgttcgctgccaagcgcgcgcgccagatcaacgcctattactcgcagctgggcgagggcctgttggagaatgtgggcccgctggtcgagaccagcgtccaggagaagccgctgtccatcgcgctgcgtgagatccagtccggcgtgctcgagtacaagaagatcgatccggtcgccgaggccaatgcacgcgccgaggccgccaaggaccccgacttcaagttcgacgatcccttcagcggaatcgaccccgcctgatctgcggcactgcgctgcactgacccgcgtaatgcccgggctgtcctcgggcggaaggacccagcatgcccaggttgttcacctcggagtccgtcaccgaaggccaccccgacaaggttgccgacgcgatcagtgacgcggtgctcgacgagatgctcagtaaggacccctcgtcgcataccgccgttgaggtgctcatcagcaatggtgtggcagtcgtggccggggaagcgaccaccgagtcatatgtcgatatcgccgacgtggcccgggcacggatgctcgagatcggctacgactcgttcgacaagggcctcgatggcgcgacctgtggcgtcatggtcgccctgaacaaccagtcgccggacatcgcccacagcgtggagcactcctgggaggaacgcaacaacaaggccaccgacgacgccgatcggcagggcgccggtgatcagggcctcatgttcggctatgcgtgcagggaaacccctgaactgatgccgctgcccgtccacatggcccaccggctcgcccagcgactggccgaggtgcgccgcaccggtgtgctcggtgacctcggtcccgacggcaagacgcaggtgaccatcgaatatgacggcctcaagccggtgcgcgtggtcaatgtggtgatctccacccagcacctcgagggcgtcgacctgcaggaacgtctcactccggagatccgccaggaggtgattgccccggtgatggagggctacgacatcgattcccgcgagatgacgaccctgatcaatccctcgggcaccttcgtcatcggcggcccgatgggcgatgccggactcaccggtcggaagatcatcgtcgacacctatggcggcatggcccgccacggcgggggagcgttcagcggcaaggatccctcaaaggtcgaccgctcgggcgcctatgcctcccgctgggtggccaagaacatcgttgccgccggccttgcccagcgttgcgaggtccaggtcagctatgccatcgggcgggccaaccccacgagcttctatgtcaacaccttcggaaccggcgcggcacccgacgatcgcatctgtgatgccgcgaagcaggtcttcgacctgcgcccgcgcaccatcatcgatcaactcgacctgaagcggccgatcttcagccagttcaccaactacggccacttcggccgcgaggttcccgatgcgcgatgggaactcaccgatcgggcagatgccctgctcgccgcgatgaagggctgaccgtttcccgccgttccctccacgtggtcgcggccgatgcgccgcaccggtgtgcccggctcggaatcgcccggtgcggaaatgtcagtggcgcctcctaggatcgggccatgacgactatccagcagccggacggtggggccgggacgcatcccgggatcgcccgcctggctctggacgtctacctgccccacctcgaccgcttcttcgattactcgataccggaccgactggcccaacaggtccagctcggctgccgcgtgcgggccaggttcgcggggcgcatggccaatggcttcgtggtggggctgccggcccgggccgaggtggacaagctgtccccactggaccgtgtcatctccccggagcccgtcctcctggcccagcaggtgccactgttgcgcgcagtggccgatcactatgcaggcacgttcgccgatgtcatgcgccttgccgtgcccccgcgtcacgcggccacggaggccgccgagcagaacccctggcctgcgcccgacgcccgcgaggtccccggtgggggactcaccgaagtggatgacggccgccggttccttgacgcggtcggccaatcacgtccggtgagggcccattggtgcgccctgcccaggtggcgaagcgatgaatccggactcgacgactggacacgcggattcgtccaggccgttggtgccgccgtgggggctggtcatggcgcgctggtgatcgttcccgacgttgaccgggtgcgtcggatgcgtgacgtgctgcgggcggtgctcggtcccggttgcgtcgccgagctgcactccgagctggggccggccgcccgttaccggaactacctggccgtgtcgcgcggccaggcccgcgtcctggtgggcacccggggggccagctatgcgccggttcacgacctgggggtgatctgcttgtgggacgacggcgacgacctgctgtccgagccacgagcgccctatccgcatgcccgcgatgtcgcggcactgcgggcagcccaggagtcctgcgcgctgttgttcggttcctatgcccgcaccgccgagatgcaggcgtgggtatcgaccggttggctcgtccccctgggcctggccccggcccggacccgacgccttgccccaccggtgcgcgccgccgtcgactccgacatcgacctgcaacgtgacccgatggctgcggccgcacgcgtcccgaaggaggcattcgagaccatccgtaccggtctgctctccgggccggtcctggtgcaggttccgcgcgccggctatctggtggcgctgagctgtcagcggtgccgcacgccggtgcggtgccccacctgcggggggccggttggggccgaccggctgggtgcgggccaacggcgactgacctgtcgatggtgcggacgcagcctcaacaactggtcgtgtcccgtgtgtggcagtcgggaactgcgggccccggtggtgggatcccagcgcaccgcggaggagctcggccgggcgttcccgagctttcggctggtcagcagctccgcgcagaaggtcgtcgaccaggtgggtgccacaccggccctggtggtggccaccccgggtgccgagccgcggcccgaggccggctattccgccgccgtcctgctcgatgccggcctcatgctgacccgcgctgacctgagggcggccgaggagtcctatcgccgctggctcacggtggtctccctggtgcgttccggcgaccagggtggcaccgtcagcgtggtggggcccgccgaggagcgcaccgtgcaggccctggtgcgcctcgacccggccggcttcgccgagcgggaactgtctgatcggcaggcagcgggatttccgccggcggtcaggatggtggccgtggaggccgatgagaagaccttggccgacttccgctccgtggtcgaatggccctccgacgcccaggaacttggtcctgtgccgatcgccgattcgaccccgggatccaccgagcaactgtggcgactcatggtgcgcatcgaccggaccatgggcggtgaactgatcgttgcggcccgacgggcgctgtcgatccgcagcgcccggaagcgaccgggcgcagtgcgggtccgtgtcgatccgatcgagttgttctgagccacccgacggccaccagagtgcttccacccggctcggtagtcttgacccttgccaacaacgaaaggcttcaacggatgcggattgtcttcgccggaaccccggacctggcggtaccgagcctgcgtgccctgtcccgcgccggtcacgagatcgcggcggtggtgacgcgtcccgatgcacgctccggacggggtaagcagctggtctcctcgcccgtcgcccgggccgccgaggagatgggcatcgcggtgctgaaaccggagcatccccgcgaccccgggttcgccgaccaactcgcccggctttccccccgggcatgcgccgtcgtcgcgtacgggggactgctgccgcagtctttgctcgatctggttcccgacggatggatcaacctgcacttctccctgttgccggcatggcgtggcgccgcaccggtacagcgggcattgatggccggtgacacgcagaccggcgtcaccaccttccgcatcgtgaagaagctcgatgccggacccctctatcgttcagtgcgggttccgatcggccccgatgagacggcaggcgagctcctcgaccgattgtcggtgatcggcgcggacgtgctcgtggagacctttgccgacatcaccgcaggcctcgaaccggttgaacaggacgacgacggggtgagcatcgccgccaaggtcagcgtggatgatgcccggatcgactggcgccagcccgcggcgcgcatcgtcaacctggttcgcgggaccaacccggcccccggggcatggtcggtcctggcgggccgccacttcaaggtattgcgcgtggtgccggccggcgacacgggtgccggcacggcgctgctgtccggggagctgcgcgccacgaacaagcacctgtgggtgggctgcggtgacggtgcagtggaactgatccaagtgcgtgacttcggcaagaagtcgatgtcgggcgccgattgggcgcgcggggcacgaccaactcccggtatccgattcgaggcggcagaccatgagtgaacaacgacacagcgaccacaggacggcgggccgggattctggtcgcgcccgcgacaggtccgcgggggaccggcgcaggccctcgacggaccgccccggagcccgacgcgaattcaatcgcgatggaactccgcgccgcccgatggaccggccccggcgcacggcgttcgagatcctgcgtgaggttgatcggcggggcgcctatgcgaaccttgccacccgtcaggccatcaacgaccaggaactcaccgggcgcgacgcggccttcgtcaccgaactggcctacggcacctgtcggatgctgggcacctatgacgcgatcctggcgcaggcctccggccgggatctcaacgacctgcagcccgacatcgtggatgccctgcggctgggcgcccaccagctgctgggcatgcgcatccccgaccgggccgcagtggacaccaccgtcgacctggccgccatcgtggtgggggagcgcgtggccggcctggcgaacgccatcatgcgcaaggtcgccgcgcatgacctggaggcctggtgccgccaactcgcctacgacgagcaggacttccgctgcctggtgagcgggcacccggactggatcgtggacgcctaccaggacctgctccccaccgaggaagtggacgccgccctggccgccgacaatattgcccccgttccaacgctggtcgtgcggccgggcctgtacaagcgcaaggacctcctacgtgacggcggtgacccgacgcggtggtcgccgtggggagtcatccgaccgggcaaccccggcgacctgggcgccgtccgcgacggtcgcgccggtgtgcaggacgagggcagccaactcatctgcctggccgccaccagggccgacatcccccgcgacctgccctggctggacatgtgcgcgggcccgggaggcaagtccgccctgttgcgggggatggcacctgagcacggtgccttcctcaccgccagtgaggttcagccgcaccgcgcccacctcgtcgcccagtccctgcggcgctatcccgccgaggggcatgagaccatctgcgccgatggcaccgcacccgcctggcagcgcgattccttcggcctggtgatggccgatgtgccctgttcgggactcggtgccctgcgtcggcgtcccgacgcgcgctggcgcaaggacgttgacgacctggtcgagctcggcgacctgcagcgctccctgctgtccagcgccctggatgcctgccggcccgggggcgtggtggcctatgtcacctgctcgccgcaccgcatggagtccgccgatatcgtcctggccgacacctcccgcttcgagatcctcgacgcgcccgcgctcatccccgaggtgccgggggccgccgcgtccaccgatgcacggttcatccagctgtggccacatcgccacggcacggatgccatgttcatggccctgctgcgcaagcgctgagacccccgccaatccctagactgaaagcgtgtccatgcgtattacccccagtgtcctcaatgccgatctggccgacctcgccggcgaggtcgcccgcatccccagcgccgatgcggtgcacatcgacgtgatggacaaccatttcgtgccgaacctgacgctgggcctgccggtggtgtcctcgctgcagcgccacaccaagctgcccttcgacatccacctgatgatcgaggatgccgacagctgggcgccgcagtacgccgaggccgggtgtgagtcggtgaccttccacgccgaggcgacctcggcgccggtgcgcctggcgcgtgagattcgtcgcctgggatcggcggcatcgctggccctgcgccctgccacgcccatcgagcccttcgccgatctcatcgccgaattcgaccaggtgctcatcatgaccgtcgagccgggcttcggtggccagaagttcctcgacatcatgctgcccaagatccgccgcacccgcgccattgccgcggccagcggtgtggaactcgccatccaggtcgatgggggcgtcagcgtcgacacgatcggtcgatgcgccgaggcgggtgcggatgtcttcgtggccgggaccgccgtcttccgggcaaccgatcccgacgagatggtcaccacgctgcggcagaccgcgatgcaggccgcccacagccactgagtggcgtcccggctgccggtgggctggccttttccgcggtctcggatagcctgaagttcgtgacatcaccgaactctgaattcagtcttgaccgctacgcagacctcacggcacggttcaccgccgatcccaccgcacgggtggcgcagaacgcggtttcgaccaccaacgccgacaagctgagccttgaccgccaagtgctcacctcgatcgacacctcggtgtcggacaaggtggacacctggaaggtctccaatcagaagcagagcgggcgctgctggctgttcagcgggttgaacctgctgcgcagccacctgatcaacgacctgaagctgacccccgacttcgaactcagccagaactacctgcacttctttgacaagctcgagaaggccaactggttcctggcgtcgatggccgagatgtccgatcgcgacatcgacgatcgcaccgtgcaccagatgctctccgacccgatcagcgatggcggccagtgggacatgttcgtgtcgctggtcaacaaatatggcgtcgtaccgaagtacgcaatgcccgagacggactccagctcgagcacgcgggtgatgaaccgacgccttgaggaaatcctgcggcgcggggcgctcatcgtgcgtggggcagcggaccgcggccaggctgatgcggcgcgcgaatcgattctcacgcaggtccaccgcgtgctgtcaatccacctgggcacgcccccggcgagcttcctgtggcagtaccgcgacaaggacaatgccttcacccgcgtgggccagctcaccccgcgtgagttcgccgacacggtcgtccccatcaacctggacgacttcgtctgcctggtcaacgatccccgcccgagctccggattcaacaccatgctcacggttgaccacctgggaaatgtcgtcggtggacgcccgatccgctatctcaatgtggagatcgacgccatcaagaagatcacgattgatcagatccgcgccggccacccggtgtggttcggctgcgatgtgctgccccagttcgatcgcgatatcggctactgggacctccatctccacgattatgagggtctgtacggcatcgatatggacaccaccaaggccgatcggatggtcagtggggcatcggccatgacccacgccatgatgttcaccggggttgacctgctggacgacgcgccccgtcgctggcgcgtggagaactcgtggggcgatgaccacgccgacaagggcttcttcaccatgaacgattcctggttcgaccagtacgtgttcgaggtggccgtgccgaaggcctcactggaccagtcattgcgcgacacactggccaccgagccgaaggtgctgccgttgtgggaccccatgggtgccctggcctgagcaccgcccggagccacatgtgaaggagggcctccccttgtggggaggccctccttcacatgttcacgctcgcccgcatcccggcagtgccgggccggcgtcagcgggtgcgccggtgcctcagataccgctggaagtcggcggccaacgcgtcacccgtgctgccgggcagctgctcggcgtcctgctgctcctccaggccctggatgtattcggccacgtcgggatcctcatcggccagctcgtcgacgccacgctgccacgccctggtgagttcgggcaggtcgcccaggtcaatggcctcgtcgaggaggtcctcgacccggcccagcaacgccaacgtcgccttcgggttgggtgaacccgagacatagtgcggaaccgacgcccacaggctcacgcactccagacgctgcttgcggcattcgtcggccagcgcgctgacaatgcccgtcggcccctcatactggctcggctcgatgcccaggccggcaatgatccgattgtccgacgatgaggcattcaccggcaggggacgcgaatgcggactgtcggtgagcatcgcgccgaggatgatgaccatcgtcgggttgcaggcccggaacgtcgacaccaggatgcggcagaagctgcgccaccgaaggttcggctcgggtccggagatcgccaccagatcacgatggggcatgtggaccacggacatgcggatcgtcggccagcgcaacgtcgaccggccattgaccatctcgaccttcggtcgggtggtctggaaatcgtagtagtcctcgctgtcgagctcccagatgagatcggtcggataggtgtcggtcaggtgattgaccacctctgaggcagcgtcggcggcgtcattccaaccctcgaaggcggcgatcaccaccggatcgcgcaaggtgctccacgtgtctgccatgcgccaagactagttcgacacgacacagggtcgcaccgcccgccaaccggcggcgtttcgccaccagcgccacgtccacggccgggaccggaccgggcaccacgcgccaccgtctaggctgggcgccgtgcaaaacagggatctacgcgaagtgctcggccacgaggtgattctcggtgacggggccatgggaaccatgctccaggccgccgttctcgggccggacgatttcgagggacacgatggctgtaacgagatcctcaatgtcacgcgccccgatgtgatcctcgatatccatcgcgcctatctggccgccggttcagacgtcatcgaaaccaataccttcggggcgaatgccgccgccctgggggaatacggaatcaccgatcgcctggccgagctggccggtgccggcgcacgccttgcccgtcaggccgccgacgaggccggccccggccactgggtgttcggttccatcgggccgggcaccaagctgccgaccctgggccacatcgacttcgtcaccctgcgtgacgcctactacacccaggtctcggccatgatcgacggcggtgtggacgcggtccagatcgaaacctgccaggacctgctgcaggccaaggcggccgtgatcggcgccaggcgcgccgcacgcgacgcccacgtcgacctcccgatcatcgtggacatcacggtggagacgaccggcaccatgctgctgggcagcgagaccggggctgccctgacgagcctggcaccactgggcgtggacgtcatcgggctcaattgcgccaccggccccaccgagatgagcgagcacctgcgctatctgtcggcccacgccgactgcgccgtgatggccatgccgaatgccgggctgcccgaactgaccgccgacggggcggtctacccgctgggacccgatgagttcgcccgggcacaactcgactacgtcgaacgctacgggctggcgatcgtcgccggatgctgcggcaccacccccgagcacatcgcgcggctgtgtgccgcgctcggcgcccaccgacccgtggagcaccgcgacccggaactggtcaacactgtgtccagcctctactccgaggtggagctgcgccaggagaccagctacctggccgtgggggagcggaccaatgcgaacgggtccaaggccttccgcgaggccatgctcgccggagacctggagacctgcatcgacctagccaaggcacagagtcgggaaggcgcccactgcctcgacctgtgcgtcgactacgtgggacgcgacggcgtcgacgacatggccgagctgtcacaacggttctccacagcagtgacgctgccggtgatgctggattccaccgagcccgaggtcatccgctcgggcctcgagcacctggccggacggtgcatcatcaactcagtcaacttcgaggacggggaccagcccggatcccggtttgcccgcctgatgccgatcatcgccgagcacggcgccgccgtggtcgccctgacgatcgacgaggagggccaggcccgcaccgccgaacgcaaggtcgccatcgccgagcgactggtcgatcaactcgtgggcacctggggcatggacgagggagacatcctcgtcgactgcctcaccttcccgatcgccaccggccaggaggagacccgccgcgacggactggagacgctcaacgccatctccgagttcaagcgccgccatccacgggccggcaccaccctgggcgtgtccaatatctccttcgggctgaacgcggccgcccgcgtcgtactcaactcggtgttcctgcacgaggcggtcgaggcaggactggactcggcgatcgtgcgggccgccaagatcatgccgatggaacgcatcgatcccgaacagcgacaggtcgccctggacctgatctacgatcgccgcacccccgactacgacccgttgaccaggatgctcgacatgttcgccggcgtctcgtcggccgatgtgcgcgccgagcacgccgccgaactcgccgcgctgccactgaacgaacggttgcgccagcgcatcatcgacggcgacaccaacggactcaccgacgacctcgacgaggccctgcgcacccgcggggcactcgacatcctcaattccgacctgctcgagggcatgaagaccgtcggggagctcttcgggtcgggccagatgcagctcccgttcgtcctgcagtccgccgagacgatgaagcgggccgtcgcgcacctggaaccccacatggattccactgacgaggcggggaagggcaccctggtgctcgccaccgtcaagggcgatgtccacgacatcggcaagaacctggtcgacatcatcgtgtccaacaacggctacaccgtggtgaacctgggcatcaagcagccgatcagcgccatcgtcgaggcggcgaagcagaaccacgccgacgccatcgggatgagtggcctgttggtgaagtcgacgatggtgatgaaggacaacctcgccgagctcgaccgactccgggtgggcaaggacttccccgtgatgctcggcggtgccgccctgacccgcaccttcgtcgaggacgacctgcagcgcgacttctccgggcaggtgcgctatgcgaaggatgccttcgaggggctcagcctgatggattccgtgatggcgatcaagcacggcgatccggacgcggccctgcccgagccgcgcaagcaccgcgtggtcgccaggccgcgcgccacggtcgaaccggccgacggtgggccggtgcgctccgacgtcgcacgccccgtgcccggatctctggacgtgccccgcgcgccgtggttcggcaatcggatggccaagggcatcggactggccgagatcaccgaatggctcgacgagcgtgccttgttcaccggacgatggggattgcgcggacccaggaagaccgacggcacgcgcgacctgatcgaacaggagggacgtccccgcctgcggggctggctcgaccggatcgccgccgagggcctggcggttcccggcgtggtctatggctatttcccctgctactcacaggggaacaccctgatcctgctggaccccaccacccccgaagccctcgactccgaggccagtcgcttcgacttcccccggcaggcggcaggccgccgcctgtgcatcgccgacttcttccgcgatcgccgcgaggccgaggaattcggtcccgacaccgtggccctgcagttggtgaccatgggggagcggttctcgcaggtcaccgccgagctgttcgctgcgaatgcctaccgcgactacctcgaactccacgggctgtcggtgcaactggccgaggcattggccgagctgtggcaccaccgcatccgcaccgaactgggcatcgccggcgaggacggcgagatgaccgccatgttgcagaagcaggcctatcgcgggggacgctacagcttcggctatggcgcctgccccgacctggaccaacgctccctgatcgaggacctgctgcagcccgaccgcatcggcgtgcacctgagcgaggagttccagctgcatcccgaacagtccaccgacgccatcgtcgtcacccatcccgaggccaagtacttcaacacctgagtggggcggccgggtcaatgacctgaccgggatggacgcagcaagttggggggtgggtccacggacccaccccccaactgcgtcctatcggtcgcacgggtttccgcgtgtgtgcgtcctatcggtcgcacgggtttccgcgtgtgtgcgtcctatcggtcgcacgggtttccgcgtgtgtgcgtcctatcggtcgcacgggtttccgcgtgtgtgcgtcctatcggccgcactgggttcccgcgggtgtgcgtcctatcggccgcactgggttcccgcgggtgtgcgtcctatcggccgcactgggttcccgcgggtgtgcgtcctatcggccgcactgggttcccgcgtgtgtgcgtcctatcggccgcacatggcattcatgtcgcccgtccatgcgagcaccgccggtgccccggtgcacagcgacgagctggccttcacgccctcaccggcctgcagggcctcaccgtgcccgaacgcctgcttgcgcgagcccatgaggctcgagaggaacccgggctccgcatcggtcaccagcttggtctggtcgggatcaacgccggcatcccgggcaatctggcggaatgcctcttcgcgccccagcacgtcgtccaccagatgcttgtccttggcgtgaatcgccccgagtttactagaggctcgcaagtgccgcctcggcgggtgccgatgcggggtgattgtgatggtaggtgtcctcgagctcgacgggcgggatcatgccgatctcgccgtgcagccgccggtggttgaaccaatcgatgtattctgcggtcgcgatctcgaggtcgtcgatgttcttccagggcccgcggttgcggaccagttcggccttgaacagcgagttgaaggcctctgccagggcattgtcatacgagtcgccggtggagccgaccgaggcggccgcgccggcctcggcaagacgctcggtgtagcggatggcgacgtattgaacgcccttgtcactgtggtgcgtgagcccggtgacggcctggcctgcgtgatcgcgggtccagatgcccatctcgagcgcgtccagcgcgaggtccgtccgcagcgatttcgacagctgccagccgaccacgcggcgggagaacacgtcgatgatgaacgcggcatagacccagccggcgaaggtgcggcagtaggtgatgtccgcgacccacaactggttcggagcggtcgcggtgaagtcacgttcgaccaggtcaggacgatcatccgggccacgaccggagatcgtggtgcgcgggcccttggcccggctgacccctcgcaaccccgcgacgcgcatgagccgctcgaccgtgcaacgcgcgacggcgacgccctcgcggcgcagctgggcgtggaccttcttcgccccgtagacgccgaagttcgccgcatggacgcggtggatctcgaccagcagttcctcgtcgcgtagtgctcgcttcgagggtgggcgggtcttgaacgcgtagtacgtgctcggcgcgatctgcgtgcccgctgcggtcagcgttcgacagatcggctcgacgccgaactcatgcctgtactggtcgatgtactccacgatcaacgctgtgggcggtcgagctccgccgcgaaaaaagccgaggctgaacgcaggatcgagttcgccctgcgcagctcacgcacttccttctccagctcgaccaggcgctgggactcgctggtcgtggtcccgggacggtgcccctcgtcgacctcggcctgcacgacccagttcctcagagtctcgggattgatcccgagctgctcgcccacacggcgaaacgtgcccgacctcgtcgatggatcgcgccgtgactgaactgccatcctcgtggctctctcccgaagctcgtcggggtacttcctcggtgctgccatgctcctcatcctcccgtggattcagagcctccaccagacccggggctattcagcggtttgggcatcgaacatataggcgcccaggtcgttgcggatcgtctcgggggcgatgccccgcgacgtcgacacccagttcacgaaggcgtcatattcccgggaaaggcctgcggtgtacacgtcacgttccttctgggtcatgtcgcggaaggcattgccgaagtccttggcctctccctgggtcaggtagaactggtcaatgccgccactggcggtgacaccgttgcccaacaggccgccatccaccgcagtgacatcgcgatagcgggcgaagggccccatgatcacgccgatactgccgaccatcgtcccctggtcggcatagatccggttcaccccggccatcgcatacatgcccccggatgcggacatcccctcgacgaaggcgaagctcttcttcccggtgcgctgctcgtatcggtcgaccgcgtcggcgatcgcccgggaaccgttgatcgacccaccgggggtgtccatgagcagcacgaggccggcggcactgtcagcggtgagcgagtcgatcagcttggcgacgtcatagccataggtggccgagctgaacatgcccgacgacgatccacccgatgcctggatggtccccgacaccgagatcgcacgcagtgtgttcttggcgctgctggaaccccacagggtcttggtgacgctggtctcggcagaggtgttggcccgtccgatacgcgcgacgcccaccagggcgaccatggcgatggcactgatcaggctgagcgcacacaacaccgcgccgatgcccagcgccacgcccattccctggccgaacccgcgcttcagcccggcggggggagcggccggcggatagccgccgaccacgtgtgggaagaagggcggggccggctggaagggtggcggcggttgttcggccgccccctcgggcggacggtcgggcgggggctgggcaccccgggttgcggcgtcgtcgggcggttgggggatgctcatgggcgttccttcgcgactgggcggcatgtgcaattgcgatcatcctagagaccccatcagccgcccgtgccggctgtggaaagccgtcggaaccaccccacgggacacgaccggccgtccggagcgggccccgcgcggccacaattgggcattgccgccgtccaactgggacaatggctcctcgtgacttccgtatcgccgcgactgcccgccgccgtgctgtgggacttcgacggcacgatcctggacaccgagccggcctggatggccagcgagatcgcctatgtggcatcgcactcggccgtgtggaccctcgacgacgcccgggggtacatcggcgcctcgtggcgcaccctcggcaacgccctgggccaacgcatcgcggaggaaaccggaaccaccggaatggatccctgggacatctaccagtcggtcagcgccggtgtcgtcgaccaggtgcgtgccggtcaggccccgctgcgtcccggggccctcgaactactggacgcgctcggtgccgccgccgtgccctgcgcactggtctcatcaagccccgaatcgctgttgcgggccggcgtcgcggcactgggcatccccgacccgttcgaggcgctcatcgccggtcccatggtcgagcacggaaagcccgcgccggactgctatctactggccgccgcaacgctgcaggtgcccatcgggcagtgcgtcgtgctggaggactctcccaccggatgcgaagcggggcagcgctccggcgccctggtgatcggcatcccctcggtggcgcccctgccctcggtggcgggtcaattgcggcgcgacagcctcgtcggcctcaccgtggccgacctggcagccatggtccgcgcccacggtgcccacagtgcccacaaggaggacagccaatgagccagctcgatccagccgccctgtccggcgtgcacaccggaccgttgagagccggcgaacgggtgaccctgaccgacatcaagggccgacgccacaccctcgtcctggaggtcggcaaggacttccacaccaccaagggtgcggtgaaccatgacgagatgatcgggcgacccgagggcggcgtggtcaccaccgccggtggcgcccagttcaccgtcttccggcccctgctctacgagtacaccgtcggcatgccccgcgaggcagcggtgatctaccccaaggatgccgcccagatcctgatgtggaccgacatctttccgggtgcccgtgtgctcgaggcaggcgtgggatcgggggcgctcagcctgtctctcctgcgtgccatcggaccgacgggcaccctgcacagctacgagcgacgccaggaattcgccgacgtcgccgagctcaatgtcacctccttcctcggggggacccacccgggctggacgatcacggtgggcgacctggtcgacgagatcgccgatgaaccgatcgatcgtgccgtgctcgacatgctgagcccctgggactgcatcgacgcagtagccgagcgcctggtgcccggcgggctgctgtgctgctacgtcgccaccaccacgcagctgggaagggtggctgaccagctgcgctaccacggtggcttcaccgaaccgtcgctgaccgaaaccgacgtccgcgaatggcacgcggagggcttggcgatcaggcccggccatggcggacacggccacacgggattcctggtgatctcccggcggatggcccccggcgtcgatgcgcccatgaagaagcgccgtcccgcacccgccgcctacggcgccgactatgccggaccggtgccgcgcaatgtcctgcccgagcaattggccgcaaaccggcagcgatccctcgacgactccgaccagatcgccccggccgtcaagcgcgccctgagacgccatgtcgatgcccaacgcagcattcaccccgccgatggtgcgcagcgggcccagcccgcgcccggagacggccacgatgagtagtctggatcggatgaacgagacccaatggtcgcgcccccacgctcgtcccggtctggatgacgccctgatgagcgcctcgacgagctccttggtcgacctcctgcacgccgtgcaccccgaattgctggccaccgccggcgtcggcaccgacggcgtgcagcccacccgggcgaccaccatcgtggccgtcaagtaccgcgacggcgtggtgatggccggcgaccggcgggccacccggggacacgagatcgctcagcgcgatatcgagaaggtcttcgccgcggacgaggcgacactgatcggcgtggcgggtgccgccggaatggccatcgacctggcccggctctatcgcctggagctgtcccactacgagaagctggaaggcgcctcactcagtttcgagggcaaggcgaaccggttggccaccatgatccgcgagcagctcacgatggccctgcagggcttcgtcgtcgtgcccctgcttgcgggctgggacccacatcgccgcgagggacgtgtggtcagctatgacgccaccggcggacattacgaggagtcagaattcgcctccatcggttcgggatcagccttcgcgcggggatccctcaagaagctgcaccaccccgacctcgagcgcgatgaggctgccctggtgtgtatccaggcactgttcgacgcagccgatgacgactcggccaccggcggaccagacctgatccgggcgatctacccggtagtcatgtcagcgtccgagcagggggtccacgggttctccgacgacgcggtggccgggctcaccaacacgatgatgtcgggacgccatggccgccccaacggaccgggggcagccagctcatgagcatgccgttctacatctcgcccgatcagatgatgaaggaccgggccgaattcgcccgcaagggaatcgcgcggggacgctcggcgatcaccgcgcgctaccacgatgggatcgtcttcctggccgggaacccttcgcacacgttgcacaaggtgtcggagatccacgaccggatcggcttcgcggccgttggccgctatcacgagttcgagaacctccgggtggcaggaatccgctatgcggacctgcgcggctacgcctacgaccgtgccgacgtgagcgcccgggcgctggccaattcctatgcccagctgctggggaccgccttcagcgccggtgcggagaagccctatgaggtcgaacttgtcgtggccgaggtgggcgatgcccatcccgacaccgccgtggcacagggcggcgaccacgccgaccggctgtatcgcatcaacttcgacggctcggtctccgacgagggccccttcgccgtgatcggcggccacccgggtgccgtgcaggatgtcctgcgcacccggctggatcccaccgcgccgctcgcgatggtggtcagcaccgccatggatgccctgcgtcggggtgggtcacctgaactcggtcccgccgatgtcgaagtcgcagtgctcgaccgcacgcgcatcccctcacgcaagtttgtccgccttgatgttgcccaggttgccgggctgctcggaaaggaatcctgacgtggcccgctccacctccacggccgacgacgaagaatcgcaacccctcagcccggtggtcatcatgggcaccgggctggtcggcgcatcgatcggatgtgccctcaccgcagtcggcgaggacgtccggctgcgtgaccgctatcgctcacatgccgtcgtggccgcaggcctgggcgccggctcggtcgaacatcccatccccacctccgtgcacctggtggtcgtcgccgtgcccccgcaggccgtgcccgaggtcgtggactgggccctgtcgcactaccgcaatgcggtggtcaccgacgtcgccagcgtcaaggcgcccgtcctggcggacctgaggacccggggacgcgatctgtcgcgctatgtcggctcgcacccgatggccggctcgcagtacagcgggcccctgaccgccaccgccaccttgttcgtggatcgcacctgggtggtggcgcgaggcaccgggaacgaggcttcccaacgcatggtcgaacggctcgcggtgatgtgcggtgcccatgtggtgcacctggatgccgacgagcacgaccgcgccgtggccgagatcagccacatgccacaactgatgagcagcctgaccgccgcacgactgcgtgacgtccccgcctccgacctgctgttggccgggcagggcgtgcgcgatgtcacgcgcatcgccgggtccgatccggccctgtggcgccagatcatcaccgccaacagcaccgagatcggcacccagctgagggcgatccgcggcgacctcgacaggctcattgaccagctcgacgaccccgacgcgattgccgacctcgtcgagcgcggtcgcgagggcgtcgcggcgctacccggaaagcacggccgcaagatcggggacatgtccgcggtggtcgtggagatcccggatacacccggtgcgctggcacggctgttcaccgacatccaggcgcagggaatcaacattgaggatctgtccatcgagcacggattgtcccgggaagtcggctacctgtcggtggccgtcgacgccgagcgggctcccgacctgagggccgccatggtgcgggccggatgggacctgcgctcgtgagtgcaatgagcaacgtcaacaacgatcgaggagagggccatggctgacaagccggcattggtgattgcgattgatggtcccagcggggccggtaagtcgagtacggcgcgcggggtcgcctgccgcctgtccatggcctatctggataccggggccatgtaccgggccatcagctgggcctgcctcactgatggggtcgacccgacgagccattcggccctgttcgcccgggccgaaaccgccgacctgcagatgggactcgatccccgccacccgacgatcatcgtggacggtcacgacgtgacccgcgagatccgcgacccgcgcatctcggacgccgtcagtgccgtggccaccacgccggagatccgcacgctgctgacctcgcacatgcgccagatcatcaaccgcaatccccgcatcgtggccgagggacgcgatgtcaccacccaggtgtggccgcaggcccgggtgcgcgtgctcctggtcgccgacgccgagacccgcatcgcgcgacgcgaagcacaactgctcggcaaggtcgatcgccatcgggtgtcctcgtcgatcgtcgaccgggaccgcaaggattccacgatgagcgagttcgacaagccggcaccgggcgtgacgctcattgactcgacctaccttgacctcggccaggtgatcgatcaggtggttggcctggtgcccaccgaactgcgttgaggcaggtgcgaggggaccggcgggaggcgcgcggcgtcccgggggcctgagtacgtcgtggtccgtggggcttggtggtccgggggcttcgcgcgatcgactagcgttgggtccatgactatcgccgagactgcgcaagcccagtccacccgtccggtggttgccgtggtcgggcgtcccaatgtgggcaagtccaccctggtcaaccggatcctcgggcgccgcgaggccgtcgtccaggacacgccgggggtgacccgtgaccgggtgagctacgacgccaactgggccggccgcgaattcgtcctcgtcgataccggcggctggatcgccaaggccgagggcatgtccgcgcacatcgccgagcaggccgaaatggcgatccaactcgccgacgccgtgctgttcgtggtggacgccaaggtgggcctgaccgacgaggacgaggccgtggtgaaggtgctgcgacgctcgggcaagccagtggtcctcgcggcgaacaaggtggacgacgaacgcgtggaggccgaggcgtcgtcgctgtggcaactgggacttggggagccctatccggtctccgccctgcacggacgcggttcgggagacctgctggatgccctggtgaaggtgctgccgaagacctccgccgtcgaacccgacgaggtcggcggcccacatcgcgtggcgatcgtcggcaagccgaatgtgggcaagagttcgctgctgaaccggttggcgcgcgcccagcgttcggtggtcagcgatgtctccggcaccaccgtggatcccgtggacgaactcgtgacgatcgcgggggagccgttccggctgatcgacaccgccggcatccgcaagcgcgtcaaggaggccagcggctcggagtactacgcgtggctgcgcacccaggccgccattgagcgctccgaggtgtgcgtggtcgtcatcgacgcctctgagccgatcagcgaccaggacctgaagatcctgtccagcgtcgaggaagccggacgtgccatggtcgtcgccttcaacaagtgggacctcaccgacgaggaacgccatcgctacctcggccgcgagatcgagcaggacctgcagacctggaagtgggccccgacggtcaacatctcggcgctgaccggccgtaacgtcgacaagatcgccaaggcggtcaacaagagcctggccggctgggagacgcgtgtctcgacgggcaagctcaatgccttcctcggccgcatcgtcgccgcgaacccccatccggtgcggggcggcaagcagccgcgcatcctgttcggcacgcaggcccagaatcgtcccccgacgttcatcctgttcaccagcggcctgatggacgccggctatgtgcgtttcgtggaacgcaagttgcgtgaggaattcggtttcgaggggtcaccggtgcacatccaggtgcgggcccgcgcgaagcgcaaggaccgctgaaccgggtcgcacccccgggcgtcccggccgccggtcagagtccctggtcgcgcagccacgccctgattcgtcgccgtgcattcgcatacggcgatgagctgttgaactggatcatccgcccggcggtgtgggtgcgataccagggccgcccatagagttcggtgtcgtcgtgggcactgaccagctcgatgagcccctgttcggcccgtgcaagccgatccagcagctgtggccaggtgagctccccatggtcggcgtagaagcgctgggcaagctcgcccagctggttccagcccagccccctggccgggaaatccggctcgacgccgcgttggcgctcggtgaaccattccagcacctgctcattccagcccaccaggtacgacaccaggtcggccgggctcatcaccgttccggcgacatggcccggcatcgacgcctcgcgggcccgcgacgccggcacgcgccccaggtcgatcgacaacttcgcatagttgtcggcgatcgccaccagcagctcgtccttggtccgggggacggccatggatactcctttgtcgaatgcggatcaatcgtcccatgccccgtcgggaggacgtctgccgactcgtgggataaccatacggttggtagggttacgcgggtcgaaatgggaaggcatcaccacgtgtcattgacgaagcgacagcgctggacgctgctggcgacggtctccatcggcctgttgctcatcaccctggacaactcgatcctctacaccgccctaccgctcctgaccgaggagctgggggccaatgggtcgcagacactgtggatcatcaacgcatatcccgtcgtgatcgtcgggctgctgctgggcgctggcacgctgggggaccgcgtggggcatcgcaggatgttcctcatcggcctggtgatcttcggcgtcgcctcggccgccgcggccttctccccgagccccgcatggctcatcgcctcgcgggcggtgatcgcggtgggcgcagccgcgatgatgccggcgaccctggccctcatccggctgagcttcgatgtcgaacgggaacgaaactttgcaattgccgtgtggggcacggtctcggtggtcggctcggcgatcgggccgatcgtcggaggcctgctgttggagcacttctggtggggttcggtcttcctcatcggcatcccgttcgtggtcattgccctgatcgccaccgtggtggtcgcgccgccgaatgaccccgatccgagcaagcactgggatgcgatctcctcgctccaggccatggtgggactggtgggtgccgtgttcctgctcaaggagctggccaatgtgccgcccaactggaccgtggttgtcctgggcgccgtggccgcagggctcggcctgaccagcttcgtgcgacgacaacagcggtcgaacgatcctctcctggacttcgcgatctttcgcaatcgtgcgttctccgccggcgtgctcgccgcggccatctcgatgttcgccgtgagcggcgcccagctcatgacaacccaacgcttccagctggtcgagggcttcaccccactggaggcgggcctgctggtcaccgtggtggccatcggatcgctgcccaccagcctgctggggggcctgtacctggatcgggtgggactgctgccgctcatcgccggagggctggcggtcagtgcgatcggcactgcggtgatgatcttcggcatcgaggaccacttgttctggttgatggtggccggactcctgatctccggcatcggcctcggcgcggtgatgtcggtggcctccaccgccatcgtcggcaatgtcagcgccaggcgcgcgggcatggcctcctcggtggaggaggtctcctacgagttcggctccctgattgcggtggccgtcctgggtagcatgctgaacttcatctacagcgcgaccgtccggcttcccccgggcaccccggccgtggcacgctccagtctgaccgaggcgatcggcgtcgcgcagggtgatcaggcgatcgtcggtgccgccaatgcggcgttcgacaacggattcctggtgacgatgatcgtgctcaccgtggtgttggcactgggcgcggcagcaaccgcccggctcctgcgccactacggcccgggctcgcgctcccaggaattctccgacaaccactgaccagacgaccagcgagggagcgacaatgcgtccgagtaagcgcgatgcgatccttggggccgccctgggcgtggtggagcggggaggtgtcagtgccgtcaccttcgagtccgtggccaccgcagccggagtgaccaaggccggcgtcgtgtatcacttccccaccagggaggccctgttgctggcgctccaggagtacctggcccaccagtggcagctggacctcgaggcacagttgggcacgcccgtcgaatctgcctcgcagggtgacaagcttgctgcctatgcccgcgactcgagccacagctcctcgcgcgccgaattgctgctcatgctggagaccgtcgacgacccgcaggcgtacgccccctggcacgccgtgatgtcgcggtggacccccgccctggacacggatcagccgatgggcgacgccgaactcgaccatgccgtggcacgcctggcggctgacggactgtggctgtatgagtcactgtcgacccacgcgttgtccccgggcgtgcgccagcagatcgtctcacggctctcagcactggcacatcgcccggacgggcccgccgcaccgggcggtcccggccggcattgatgcgccgggcacacctggacgcccacacgtgccggggcctcgcggtcaggccacgaggacgacccgttgcgtcccgtgggtcccggtgagccatgcctgccccacctgcgacaggggcatggtgaggacgtcgctggtgaagtgcccggcggcgacctcatcgagcagttcgccgagctcggcaacgatgcgcgttgcgggaaccgagccctgcccactgcccacaatgtccaggcgggtcgcccgcagcgcggccgagggaatcggggactcggttcccgcgacggaaccgatctgcacccaggtgagcttctggtcgtcgtcatggcgtgccggcacgatcgcccgtagggcgtcggcggtgggccggccccacaagtagtccagcaccacgtcaacatcgctggccgcccggccgagctgttcagccacccgatcgggcgcatcatccagcgcgacgatcgcatcggggtccgctgcggccatgcgctgcgcgccacgacccacggcgatcacccggcccgcccccaggcgccgtgccacgcgcacggccatcgcgccggcattgccggtggcccccaggaccagcaccgactggccggctcgcaggccgacgcgctggcgcagggcgatccatgacgacatggccggattcatcaccgccgccacctgggccgggtcggcaccgggcggaagcaggacgctgtggcgcacatcgatcacggcccgctgcgccatggaaccgtgcacggtgtcacgcagcacgaagtaacgcagacggccctcggcatcgcgtccgacgccgtcgatgcccgggatcaggggcagctcatcagtgctcgtgtagtgcgatccggccgcctgcgaacgcacccggggatggagccccaccgccacgacgtcgacaaccgcctcatgccgaccggtggcaaccggatcggggacctcggtccatcggggtggtgacccgaattcctcgacgactgcagccctcatggcgcctgcctctcacgtgcgatggaccggaaccgcacgtcgggggcgtcacggtgaattgaccgggacgatcctgaccgggcggttgcggagtgccgggtgtcgtcgtcaggccttctggcgacctcccggctttcccggtggtgtgcatactgcgccaatacttgcgcagatcaccgccacgatgccgaatacgtcgtggatggtcatggtttgtccgaggatgaagaagccggctgccgcggccacggccggcgccagggccaacaggatcgcgaacgtcgccgccggggtacgccgcagggcggtcatctccagcgcatagggcgcaaccgatgacagcagcgcaatccccagccccgcaatgagcacatggggcccgaacaggcgactaccggtggttgccagcgcgatgggcaccgtgaccaccgaacccgccaccatcgcgacggccaggccctggatgcccgcgaagtgcctgcccgtggccttcgacagcaggatgtaccccgcccagaaggcggcggccaccagggtgaacgccacgcccaacggatcaaggtgggtggccgaacccccgagcagcaccaccccgacgagtgccaacccggcccacaccaggttcatccatcgacgtccggccaccaccgacagtgtcagggggcccaacaactcgatggtcaccgtcgtgcccagggggagtcggtccaacgcaaggtagaagaacaggttcattccggtgagcaccaggccgaaggctatggcggtgtaccaggcgatggggcgacgtccccgcagcgaggggcgcgccacggcgcagaggatgatggccgagaagaccaggcgcaacgcgacgatcccggcaggacccaccgcggggaacaacatcaccgcgatcgacgcaccggtctcctggcagaacaacccggtgaccaccagcgagggtccgaacagcgtggaacgtgctggcaatgcgggggacatgtgcccagcctttcagaggtggccctgcgctcctggccgtgatcacggtgcggtggtagccgcgtgttgtgcccggtagcgcccctaccgggcgtggggcgccctccatgacggagcgcgtcgcccgtttgggttgccgacccggaaacccttttcgtagactttccatcatggaaagcgaatctggcggggccgggaacttccacggggccaagggtccacacgccgagggcagcgcaggcgacggtcaccgtgacgaggccgccgcgacactggacgcactgtccgccgaccgccatcgccttgcggaccggttggcggtgccgtgggcattgatggctgccttcggcgcgttggcggcctggtgggtcggctcggcggtcacgaccacgccggggtcgggttacgagccgccgctggcgggatggatgaccctgccggtggcactggtcatcgcccatctggtgcgacgtgggaccggaatcaggttccgcgccctgggggcccgggccaacggagcgatgctcgcggtgctcgtggcctgcctgctcctgttcagcgtgtcattgggagccgtctccctggggatggcctggctggtcggggtgatgagcctggtcgccttcggggtcaccacgtggctgtccggcgtcgcctatcgaagcgccgtggaacgcgtacgccgtggttgaggcacgctttgatgcggtgatccatgcgccgttgcggcttcgcatctgtgggctgctgcgccctgtcgatgggcttgatttcgcgctgctgcgcgattccctggaggtgtcggatgcgacgctgtccaagcatgtcaagaccctcaccgcagcgggctatgtgacctcccgcaaggccgcctccaccgagcgcagcgacgggcgccggatcatgtggctctcgctgaccgggccggggaggctcgccttcgacggtcatgtgcgcgcgctgcgcgagatcgtcggcaccggaagctgacgcgctggctcctgcgccgcaacgtgggatgggccacctttgggccaccaggccatcagggacggaaaagcggctcttcacgaacgagggtgtagcgggttgagcgtgtcggtggccgggtaggggtcgaggtctccttgaggatggaagttctcacactcgccatctgccggaagacctcgacgtgtcacaccctactttcactacaccttgcctgaccacgttctgcggtctcgacgagctcggcctggaggctgtcgggcagcgtctggacccggatcgggcggtgatcgagtgccgtgtcgtggagccggaccggtggtgccgcgagtgtggatgcgagggcgccccgcgcgacacggtgatccgtcggctcgcgcatgagccgttcgggcatcggcccacgaccctgctgatccgggtccggcgctaacaaatgctgcgggtgtgggcgggtctggcggcaggacaccacggccgccgcgccggtacgggcgaagatctcccgcggtgggttggcgtgggggctggcgggcttggtcctcgatcatctctcggtcacgcgtgtcgcggcagggctgggggtgtcctggtccgccgcgaacgacgcgatcctcgccgagggccgccggcggctgatcgatgacccggcgcggttcgagggcgtgaccacgatcggcgtcgacgagcacgtgtggcgacacacccgccacggcgacacgtacgtgaccgtgatcatcgacctgaccccggtgcgcgacaagaccggcccggcacggctgctggacatggtcgccggacgctcgaaagccgtgttcaagacctggctcgccgccagaccgaagccctggcgagaggggatcgaggtcgtcgccatggacggattcaccgggttcaagaccgccgccgccgaagaactgcccgacgcggccccggtcatggatccgttccacgtgatccggctcgccggtgacgcgctggagaactgccgacgccgggtacagcacgacgtcttcggccggcggggcatgaagggcgatccgctctaccaggccagacggaccctgctcaccggtgccggtctgctcaccgacaagcagcaggcgcggctagatgccctgttcgccgaggacaggcacgtcgaggtcgaagcgacgtggggcatctaccaagacatgatcaccgcctaccgggacaaggaccgcggcctgggcagattcttcctcgcgcacacgatcgacaagatcagcgccagcgtcccggagcagctcgtcgagatccgcaaactcgcccgcaccctcacacagcgcgcttcggacgtgctcggctacttcgaccgccccggcaccagcaacggccccaccgaagcgatcaacggccgactcgaacacctccgcggcacggccctcggcttccgcaacctcagccactacatcgctcggtcgctgctcgaagccggcggattcagacccgcgctacaccctcgttcgtgaagagccggaaaagcggccccgaggggatgccaccatgtgggtaagaagtgggtatttcataccaaagcgggacccacctgatcggtgaatcccgctctgactacggtcgggctgacaggatttgaacctgcgaccccttgacccccaggtgccaggatcgcgggacgtactccatctgaccaaggcttttgtgtttcaggagcgcgctctgcacgtcacgttttgcagggtttgcaggctgttggtcacctgattggtccactcatccaatgtgggaaaggcctatgaccgttggactctgagtcgctctgcaactgaggactccgcagcttgcccataatcatggctgcgccgcagctctgtccgagccttgtgcagtgcatctcggacttcccgacggatccgacgttcatcaagcccttccatcgattcccgagttgaacgcgcgatctcgatcagtttgggtggaactgtctctagacgcgtgacatcaatgatcagtggaagacggcgtacttcgtcagaatcaaggtttcgacgtagcggccccaatcgaagcagctgcgaaaggtagtcagggctcagtgcaggagtgtcaggcgcctctctgcccatctgctgtctaagccaagaggagagtctgaaggcggttttatccagagtcagccaccagacctcgtgcccgagcgcgggcttagcatttcgacgcaactcaattatgccgaccacactctccatatcgtggatagccaatctatcgattaccttctgagtgcgatcagcttgcccatcgtacgagcgagaacgtctcttactaaagagctccatcgtcgcggcacgcaaggtttgatcagctttctctgcgaattccgctagatcgttcagccgaatattgaacttctcagccaagtactcctcgatatctcgatctggatcgatttccccgcgaatatcttctgcccacttaggaaactgacgttcgtcacgacccgacaacatgtaggcagcgtagaggaagggcggagggccatagcgtccgttcccttggcgaagatagctgatacaccgctcaagatggtagtggatttcctcgaccacgccatcggtcacaaataacgaaaggcccgacgatgtagcggaattcagaagtgtagtttgtaggcgttcggacggatcgtcgatcagggtctcggcgaccaatggcagcacggccgaggtgtcaagccacactttggcgttgtcaaaaaccctagacatggccttctgaacatcaggagtctgctgaagaaatgcgagaagagtgtatgcatctagcacacgagtaagatgacggcgggtcgcctcagcaggatttgagattacttcaagaatagccctaacggcttgtgtcgggtgaagtttcagcgggaggcccagcgctgtcacctgttccaccatctcatcaaccgagacgcgggccggatcacccccctcgactgcggcagcaaagctctcgccgcttctgaacatcaccgcttcgagtgcgatacgtagcgtcttagactccgccttgagctgttcagcgtcggaatccagtatctccacatagccgtaggcggcggctgcaaggtcttcttcaagtgactgttgttcgagaatgtacgcggcggcgtcctccttccacgcttcggtagcttcgtagcttagatggtatccaccgtgagacgagtggtgttttactgggccgtgcttgcgagaaagccgatcgagtgcagacttcgtgagtgctgccacctgcgaatcagcaccgtgaggagccagagcacggacgcgatcaattatctcggcttcagtgagtaagttctcttgcgatgtgtcaaccagcaccgattgaacaagggcatcaaaagaagtcttcgtgagattacggtctcctgcgcgatcctccgcattgagagcaaggtgtaccaacgccactttcgcctctccgcttgagagtggagagcccgcaactttcgcaataccgcgcgaattaacaataggcgtaacgacgcgttcgacaagttccgcagacgaaacctctctctccgaactcgtaagttctcgctcgcagaaccactcacggtcgcgcacatcaagcaggatgctctgttcatcccacaactcacccttcaaaccatcagccagtgaaccaatctgctgacttgtgcagtagatcaaacgttggtaaacaatcccgttgtcgatgagagtcctgaaggtggatcggatcttggttcgccagtccgacgttactgagaattgaaatccagtgtgggcgacgctgtcaagcgtgaaaacctcgccgtctcttcctcggtcaccagacggagtagcagtcgttcgaaacccagggaactccggcacgaggaactcagagcagaatcgctcgaacagctgccagtctccgcttgtcaactgctcaagcgcgaatctcagccgggcgctcgtcattattctagtcctttcaaacttcatcacgggtatttaggaaatagtctccgttacgctgccatcgtgttatcgctgtactcactaccgaagtccgagacattcacgaatgagttcggtgaggcaggttggctcggcgacagggacggtgaaatctcccttgaacacctcgttgtacccctgagctgtcgcagcccatgtcgctcgaatattctcgggtgcttcgcctctcacgatcaggatggagtcatcgtcctctgtctgaaaggcaccctcgggcctgagatttcctacgtttacgtcaacgtctaccgaaccggtggttctccatgatgcgtcaggcgggacgtatgagcgagaggcctggacgctctgcgcggcgattgaagcggccaagctggcggagtatcccgtgtccaagccgaagttgcgtttagttggtccccatttccgtggcggatagggaaggcctacgtcgttcaagctcagagaatcttcataccattcgcgttcgagcgcctctaccgccccagcgatgtgtagtttgatttctacgtcgtgcaggaaggttagcgtcttgttcacgacgccaacttcgttggcaggcatgagccgcacggcgaatgcttcgagcgcatcaggccaagcctctcggaattgggaggcccatgcttcaatctcgtccttgtagtcttcttcggatcgttgttcgggtacttcggcgccaagaatgcctgcggttccaagcgctccggatgcctgttcagaaataatacgagacatggcttctgacagtccggttcctaaggagtgcaggctcgataagccagatgtgactccagccgcgccgagttgtcccggttgcctggaggccggcgtgcttggcttgggcgcaggaagtgcgtcgagtagccgctttcgggtcttggcgatgtattcgttgagtgttcgttcctcgtcaacggcgagcggaacgactgtgccaacgacgctgacgccaagctctaccggagcggttggttgagcgctgccacgtgccattaggaggtcaagttcgtccgcagttggttcgcgtgtctccccgtcacctctgtagtaaatgcgtccgttctgaagcccttcgccatttgcgcggcagatgaagggcggttgtcccgtctgcggtgggtcgacgaggacgacaatcacctgattgggtgagttctcgatgggaacacggactatgtcccaatgaggcccggtggcgccgaggaacggctgaatgacctgggacaaggagagcatttcaatcggcggcacgccttcgatagcgttcttagcgatgccgataatcatcacgccatatccctcgaatgcttccgctgcacgctccggcattcgatttgccgctcccagaatgaacttcgcaatctttgccttgtttaccttgctcgaaagatcaggcggccctttgagttcgaggtagtgacgctcagcaaggtcaccacttgccgccgccgtggctatgagccgtgctgcggcaagctcgccccgcggcgcacgcgtcaggtcaagcgccgcttccggcgtgctgttcgggctcatacggccccattctcagggaagatcgccgcaacgctgtgtaggactactgcattcaactctgcacctgctccctagcgcgttcgcgtgcttgctcacgcaatctggcgcggacctcgtcatggatggtggtcgagacttcttcggtggtctcgactgagacgacaagggcgtatcgcacgtattttccggcatgaaggtgttgggcatcgtccatgcagtcgatgtggatcgggaacgtgtcgccgtctccgaagaccatcgctcgcgtgccttggatcagttcgtgttggagacttccccgcctcacactgaagtgttcgccttctacgcgatcgccagccgcgaggaccgtatcaggcgtgtcgaaatagaccttggctccgcggtaccgggtgagctgtccgacagtgggagccacgtaggcgagggtgatcgtgaagcggtgccattccgctcgtgttctgagcgatggcggtaagggaagttcatacgtgtgacgttggtctctgccgatgagaccgccagcaatgagaacagcacggttggtcgcggccgtgccgaggcgggtggtgtcgagtttgccgtagccgagcacggcagacagcttgcgtcgggcgtcttgtcccgagagcccaagctctctacggagtcgaggttcccattcaccccagctacttgcgtgcgagagaagtgccctaacaagaagcgggtgatattgcgggtcgggcagcggcgagtcttccgggtcctccgtcccagattcgagaatgtcgaacagacggctcgcttcacgggtgacgagcgcggtggcgttgctggtgccgaaggtgaaagcggtgttgttcgtcgctcctccacgtccgggtgcggcgacttggagtccggggcccgtgagcgcggtatgcgcaagttcgagtgcgacgttgtcctcgccaggcacggccaccgggcgcacgtatagcgctcgcccgccagtgtggtggaggtctggctttatggagcgatcgacgcctggtcctgttgccccgtagtacgcgggggctccaggactggtgatgtcccatacggtgtctgggaggtcgacgtcgcccaggccgtcgtcgtgcgtggctccgatggtcaaggcattgaacgcgtcccccggaggcagtattccgcggaggatgcctttctcgtagacggcgagggttgctgctgagcgcgcggaatcggcattgttcgcggctgttgcggggatcgtgatgggatcggtgtgattgccggcgctgacgatgaacagcaggttgtaggtctgcgccaaccaatccagcagacgggcgacaggactgatcctccgggtaagtgcgcgggcttcggctccgatggagaggttgacgatgcggacgctcggcgcagtcgcctctctgccgccgtcgccttcttggatgcgtcggatcgcacggtggagcaagtcggtgagcagtcgatccggcatgatctgctcgtgtgtggtgacgaattcgtgcgggcgcatgatcggccgcacgtacagggggcgatcgagcgactcaccgggtgcggagaggtcaccgtgaatgatgagcgatgccatagcggtgccgtggttacgagcagatgttgggtagttgtcgccgagtccatcgggatcgtcgatcaggagcctgccagccagtgcgtcgtggttctggaagggcaggccgtccagcagcgccacacgaggtaggccctcgacgcgttcccctgagggaagtcgcacttctgtcacgggatcaagcgtcgctggcgaaacgctcataggtgtgaacgggctgacgaacatcacttcgtcggtagtgagtagacggatggcagcggccccgtcattgagtaccgtgtggacctgctggataggcagttccgctagtagcgcgtggtaactgatgtcaccgatttggcaacggtccatgatgcgaccgccgctgacagtgacgatctgttcgacgtgcgattctgctgcggcgcgctgcgcggggtctcgacggtaccagagctcgacttcaactttcacggtgctgacggactggccgatcacgtcgagggtttcctgccaacgttcacgaaggccggtctctcggatgcggtcttctggaccccaccgtctgattgcggtcagctgctggaacgctgccttgaacttcccgagcccgtggtcgaacttggctgtcgggtctttctgccacttgtcgaaaaggtgcagtaactcgtctatcgccttagcgttcgacatcaccaggtacagcgaatgctgcacttgcttttccgtgcggcccttctcacgttcggtcatgtggaagtcatcgtcggaatcagacttgtctccgagaagctcggataggaactccagaccgtcgatccggttgatcgcgttctggaagtccttcacactgccggcgaggtcgaacacgacgactagtgcagggtctacctcgtctggggtagtttcttcgaggcgtgctcgctcggcgtcgaatgctgcggtgagttctcgaaactgcggtgatagccgttcgccttgtcgtcccgcgcctggtttcgatagacgcggcatgtctcggttgggctgggtaggccgatcatgaacgactggcggtccgaatgccaggagcggcctgcgctccgcggtcacccggctgcctgaccttgccgatgttcaaggcgttcttggacaatctggcgcagattgctgtccggcaactccaggatcgctctgcgccgaacatcctgggcgaactcttctagctctgcgtagctcgcccccgcgagcttgtctgccagtgtgcggggcgcgaagccgaggtcgccaccgaagcgggcagcgagtcgttccaggaaccgggtcgcctgggcgcggctgggaggatcgagctcagcgcgaatctgaaaccggcgccacgcagcacgatcgagcaattcgctgtggttcgtggcaccgacaaagattacatgcgctgggagacgatcgatctgaagcaggagggtcgagaccactcgcttgatttcgccagtctcgtgctcgtcagagcgttccttggcgatggtgtcgagttcatcgaagaacaggacacatcgccgggttcgagcgaactcgaatgcgttgtcgagtcgggaggcggtctcgccgaggaagctcgacacaacgccttcgtatcgaatgacgtagaagggaagcatcaactctgctgcaatggcctcggcaacgctggtcttgccattgccgggaggcccggacaacaggaggcggttacgcggctcgatcccatagctgcgcagcaactcggcgcgcttctgctcttcgaccagttcggtgatgacccggtgcggcactggggctagttcaaggtcgttcaaacgacgactcggaacgatctcttgtacgagatcacggatcgcggccgcacggtcgtcgcggacatgactctgaccggtcgttgtgatgagctccgagagacgatcggcgacgagatggtgctggttggcgcgttcctctgcgatcacagcctcgaccagtacacggaagcggtcccggtcaccccgacgttcagcctccacgaggtcgagaagtaagtctgcgcgtgccatctcgtgcctcctcactcgagtgctgtcatctgtgattcgatcctaccgttgactgcccgggcggtatcgagccgcgccgacaggggcgctccggcctcatgcctccgcaggccgagcgatggcttcctggatgcgcacccggatcaggaggatgaggctgacgggtcccatgatgaggattttcaggaagttccagcagaacaggagcaccaggaggttgagccagccggggccgccgccgccgatgaggttggtgcagatgctcgctgcgagcaggtagggcgcggccaggagcgtcgcggggatgccccacttcagaccgcggcgggtgcggatcgcgtcgagcaggatgttggtgggcatggaacgccgcaggaagtagcgggtgtggacgctcgccgcccagagtaggcgaagcatgatcgggcctctcgtcgcacgtagttctccgtcgaggaggcagtacgtggaaagagtgcccgcgaggggccgtcccgaaggacccgcaataggggagaacctgcctcgtcttccactgtacgactcggctgcgacatcgggaaggtctacgtcagagcgtccgtccgaccgactcgcgccccgcgggccgcgctgacaccgggttggggccgcgggacaactcccgtgcacggtcgagtgcggctcgggctcgggctgcgtcgatcttctgtgcgtcgctctcggcgggcgcgccgagtggggtggggtcggtgatgttgtagcggtcgcggtaggtcgcgacaaccacggccaggcgccgccaggtcgcggctgccttggcgtccttcggctccggcccgagtgcggccacccacggttggctgtcgtggagtgcggtgtcgagcaggactgtggcgcgggtttcgatgaggtcgcgtcgctcgctgagggcttggcgtaactcgggggtcatggtgccggtggcttcagggatgagcccggcgatcagacggggtgccttgcggacgcggccgctgtcggcgggtcgttcggttgccttggcgacgcggtagtggaggacggcggcgatgtcgtccgcgtccccgaacccgcgggcgcggacgaggcgtggcagcagggtctcgacgtcgtgctggttcgcctcggcccgccgcagctcggcagtgagcgcaccgaacgcgggcgaggcgatcgcgtcgtttgcctggtcgtcggtgagtccggaggttcggatgagggcggcccagcggtcgtgttgtgcggcggcggccagcgtctcgtactcggcggcgagctgagcaatcgacccccaggcttcttgttcggcggtgacggtctcgtgggcggagagttcggccccgacgtgttgcaggaccccgaacagcacgctccgggcggtggcctcggtgttctcgccggggtgtgggccgtcgtgggcgtcgtcgggcttgtcgacggcgacgtaggcgacgttctcctcgcggcctctggtcatggcgacgtagaagttctccctcgtcatcgaaacgtcggccaggacgtgtgaggaatcgaccgtgatgccctgggcacgatacgcggtgacggtgtagccgaggtccaggtcttcggtggcgtagtcggccggcagcacgaccgagccgccccacgtgcggccggcacggcgcagggtgagggacccgtcgtcgcggacctgggtgactgtccacctgtcgccgttgcggacccaggaccggccggcgcgcaggcgccggtcgttgcggcgggtgatgacggtatccccagtagcggcacgggtgccgtcgtgcagttcgacctctcgggtgccgtggacggtgccgtcgaggatcaggtcggtgcgggcccggacgttcagggcggtgacggactcggtggagtcggtgatcagcacgctcgcccggccggcgagggtgtcggcgcgccacgcggcataggcggcatcgatcatggcttcggtctccccgccctggatgcggccgtgctccaggtaggtgtcgatgacatcggtgtggccgtgccggagcccgagggaggcggtcttctcccacgggttcacgaagcggtgcacgtccaccagctcgggcgcgtcgtcgcggtcgtggacaaggagggagaatgcgccgccggcggtcaccgactggagctgggcgtggtccccgaccagcagcaccttggccccggcctcggcggcggcgacggtgatgcggtcgagcgacaaggtgccggccagggaggcctcgtccacgataacgagctgacccgcgtggaacgtggcaccggtgcgctcgtggagctcccaccacttcgccgtgttctccgtctgaatcccgaggtcatcggcaagaacctgcgcggcgaccgcggacggcgccagcccgatcacagagccgtggccgtgctcgttctcccatgcccgccgcagcgcggacatcgcggtggtcttgccggcgccggcgggcccgacgagcacgtcgatcacccggcccgagagggcgatcttcccgagcgcttcggcctggtcgggaccgaggaccagtcccttgcgatccggcttggccgcgatccgctcgacggccgccagtgggacggtcgggccggtggtggtgcgggcgcggtcaaggaggcggtcttcggcggccagcagcaccgtggaggagaacaccgtcgaatgcttcggccggaacaccgaggtgccgtccgggcggcggaacaccgtcgggctcgacgcgagctccggcggggtcagccgcagagaggcggcctcggccgcgtccacgaccaggccgacgatcgcctcccgatcctcggtcgaagcgaacctgtagcccatcgtctgccgtgccgcctccgcggtgaggttccaccgccgccacgtcgaccgcttctcacccacaacctcaaccacgctctgcccgattgcggcgatcacgtccaacggcacgtcgtcggcccccaatagcaacggttcctccttcgccgcggtgaccgtccgtgcccacgaagtcgcgtccgagccgaggatgcggccggcacggcttcgccactcggcggtgaggtccgcgagcgagcggacattcttctccgggcgggtggagagcgtggcttgggcgcggagcttgatgatcgtcgcggtcgagggctgcctgccgtgctgggtcacgtattcggcgatgagccggttcttctccacctcgatgtgccgggagcgggacgagaactcggtcaccagttcctccggcaccgctgtgatcgcccacgccggattccggtcccggcccatatctcgcgcctcccaggagacgccgaacatccgggtcagatggtcggcgaagaccgcctcgtgcagctccgacaaagcgaccgtcgccgcgtgcaacggccgcccatccaagctccgccacttgccatcaaggacggtctgcaccttgttcgagacgaccacatgcgtgtgcaagtgcgggtcacccgcccgggaatcgtagtggtcgaacgcggtcgcgatcagaccggccacatcgacctgcgcaaccgcaccgtcgcggccggttgcgcccgtacgagtggccgcaacctcccgctccatgaacgcaaccacctccgcaaccgccgcatgatgcgcctccgcgatcagcgcctgcgtgcccgcgtccgcaaccgcccacagcacggatgctgacttcgggatcgagaacgtgaagtcaaaccccgcgaccgcccgccgcatcgccgcccgcagccccggcgcccgcctcgacccgccgctcctgctcgccctcgacgaggtcggcaacctcgcacccctgccctccctgcccacattgatggccgaaggcggcggcaccgggatcaccaccatgcccgtgctccagtccctcgcccaagcccgggagaagtggtcggagaacgccgccggcgcgatctgggacgcctccatcgtcaagatcatcctcggcggcgcctccaacagccgcgacctgcacgacctgactaccctcatcggcgaacgcgacgagatcaccgactccaccaccatcggcgaccacggcacccgctccgcccaacgctccatccgccgcgtcccgatcatgccacccgacaccatccgcaccctgccgttcggcaccgcgctcgtgctgctgcgctcggccgcgcccatcgtgacccgaatgcggctctggaccacccgaacggatgcggcccaactgcgcgccgaccgttccagcatcgagcacatgctgcgacaccgcccgtaggaaaacacgcgagcacctgcctgacagagcgatcccgccgggatcgccgccgaagtcaggagggcaatccgatggccggtatccgcacttacgagtccttctccgggttcatcgcgtcaacgccgaacacagagcccaccgcgaagggcaagcctcggttctacgcgcaggccgggcagaaccagtaccgcaaagagtccgacggcagctacaccaagaccgggaccgagtacctgcccatcgtggcctacgacaagccggcggcggagctgacgagccggttcgtccggggcgacagcttcgtcgccgagggctacacccgcccgtactcctatgagaaggacggccaggccgtcgagggcgaggagttcgtcatctggaaggtcggccacgacgccgcccgtacccgctacgaagtcgaccgcgccccgcgccagacccaaagcgccaaggccgaccgagtcgccgcgacagccgcccaatcgcatgaggtccccaccgaattcgaggctcccgcgacgcaccatccggccgactccggcctcgcgctgtgaggaagaaccgatgaacgatattgaccttccggaaggcgagatgcccgagccggcgtccatggcggaccctgacgacggcctcgcgcgaaccgtgcttcccggacccccgcacccggtcaactggaacctcctgacggctgaggaggcgggacccgagtgggcggagctcgaccactgggtggcctggctccgccgtacctgcggtctgcccgcgggcgtgatcccgccgttctggcaccggcatcccgagctggtctgggaactgtccgcgctgcacctgcactggctatgcgcctacgaccccgagcagaacggctccgcaccgctcgggtggcaccgggacttcgccgacgcccgccagcggctgcgcgactgggtcgccgcctctggcacccgcctggaccgtgaccgggcgacccggcaaaccgcctggcccggcgaggaacccgccgcgccggtggaagacgtcgtgattgccgaccgggccgacgacttccgccagttcgtggcggctgacgtggcctggcggcaggcggccgaggacgccttctacgcgagcctgggcgacgacgatgccgaacgagatacctgaccgcggcatcggcccggtggagccgctgtggtgtgctcgggacgtctcagcgttcctgaacgtctcccaggccacgctgtcccggtggcggcgggagaaggccgggccgccgttcctccaagtcggcggggtctcgcgctacaaccccgtcactgtgagggcgtgggtgcgcgagcaggagaacgcgcatggctgacccacgcaatcaccggatgccgccggtcggtgtgaatctcaccaccgacgtcgagcggcgcgtcgacgggttccgcgctcgcgtgcgctggaccgatccctcgaccaagaaacgtgtcggccgcgtcactcacgtgcgcagcaccgaggaggtcgaggagttcttcgaccagatgcgcacggccacccagaccggcgccaacaccaccgtcacgctcgccgagtacgccgcctcgatcggggacaggtggaagcgaggactggacccgacgtccaccgccgagaactacgacatcggtctacggctgcgggtgctgcccgccctcggacacatccagctcgtcaagctcaccgccgggatgatcgaccgcaccatcgacacgtgggagacccagcactcggcctccacgatcaagaactccatcgccccgctcgtgcgggtgctcgatgaggccgtccgagacgatgtcatcacgatcaacccggccaagcaccgcgcgcgtcgcaacctcggcaagcaggttacccagaccaccggcgccctgcgccagtacgcgatccccgatcttgccacgctccgtacgctcgcggacgcctgcggcaaggtgcaccagtcgtattccgatcacgtcatgctcgccgcgctcctggccgcccgcggctccgaggtcgccggccttcgcgccggtgacgtggactggaccaaccgcgtcgtgcggatcgaacgccagcactacccaggcaaaggcggtctggtcgtcaagcagaccaagggccgacgcgctcgcctcgtcccgatcctcgacgctctcgaacccgtcctcgaacggctcaccgcagaaaaggagcccgacgtgccgctgctgcgcggaccgcgcggtggagtcctcaccaccgcgaccgtcagagacgcgacgcattgggacgacctcgtgaaagacatcggcctgcccaacctcacccggcacgggctccggcacaccggagcgacctggctggccgacgccggcatcccactccacgtcctccaagagatcctcggacaccaatccatcgagacgaccaagggctacctccaccccgaccaccggcacctcgccgaagccgccaagcaggccaaccagttcctctccgcaacacctgccaggagggaggctccacgccgcgacgcgccccgcctgtgaccactccgcggccctgtcccgacccctcccagagaggccgggacaccgtcctgcccccggattggtccactcgaaaggcacttattggtccacttcgacccgccatccacgacactcgccgaagccccgcatcacccgatccggacccgcgccagagcaggggccggggcccgacgagacgcagtaggaacgacgaagccctggtgagaaacatgctctcaccagggctttttgtcgggctgacaggatttgaacctgcgaccccatgacccccagtcatgtgcgctaccaaactgcgccacagcccgtgacgttgatattcagttgttcgagcagaccaagaaggggcctaaaccccttatcccccagtcaagtgcgctaccaagctgcgccacagcccgccgggcctgaaagacccgttgcaggactttacccgacagccaccgatcgtgcgaatcggacacggcgccccggggtcgacttcgcggccgcattaggcttgttggcggtgcggcaacccgtggccgcaccccgatggaacgaccccctgaggagattcgatgacccagcacatgaacgtcgagagcttcaacctcgatcacacgaaggtcaaggcgccgttcatccgggtcgccgatgtcaagcaccttccccagggcgacaccctgacgaaatatgacgtgcgcttctgccagccgaatgtgaaccacctggacatgaaggcggtccattcggtggagcactccttcgcggaatgcgtgcgcaaccacagcgactcggtcatcgacttcggcccgatgggttgccagacgggcttctacctgatcatggtgggcgagccggatgtgccccgaatcgccgacctcgtggagcagaccttccgcgacatcctggccctcgatgccgtacccgccgccaacgtggtgcagtgcggctggggagccaaccacagcctccagggggccaaggacgccgtcagcacgatgctgaggcatcgggccgaatgggaacaggtcatggcctgaggccgatacggctcatccctcgggatgatttttcccaccaatcccagggcgtggctcctgatcggggtccccgccgcccaccaatggtttaggttcgtctgcggaatgcggcaccacgtgtcgcccaccaggtgcagcgcccgaggcgcacaggaccattgagcgcccctgcaggcgtctgacgagaggcggtgccgttgaacccgacacagcacaccggcatcaatccggatcgccgtcgctggatcgccctgatcgtcctgtcgttggcgctgttcatggcgtccatggacaacacgatcctcaatgtcgccctgcccacgctgggacgcgaactcggcgccacgaccgacgagctgcaatggactgtcgatgcctaccaggtgacctatgccggcttcctgttggtcgccggtggcctggtcgaccgctgggggcggacgcgcaccttcgtcgcgggcgtggcggtcttcgggctgtgttccctggccgcgggattgtccaccaatacgacgatgctgatcctcgcccgtggcctgaccggcatcggcgcggcgctcctgaccccctcgacgctcgccctgatctcggtactgttccgccggcccggggaacgcaccacggccttcgccatctggtcaggcgcaaacagtgccggtgccgccgtcggacccctgctgtccggcggcctgttggcccatttcagctgggggtccatcttcctgatcaacgttcccgtggcggcactgtgcctggtgggagcggtgttcctgctgccgcgggtcagggccgaacgcgacgaggaccacatcgactggcccggtacggggctgtcgatcgcggggctgtgcgccgtgtgctgggcggtcatctcggcaccgggactcggactcttctcggcgcccatcatcttcgccttcctcggcggcatcgcactgctggtcgggttcgtctggtggcagcaccacgcgagcgctccactgctgcgtctcagcctgttccgcagccgccccttcgccgtctcggtggcagtgtccggcctggtcaccgccggtggtgccggagcgctgttcgtgctcacccagttcctgcaattcgtcctgcagttcacgccatggcaatcgggactgagcatcatgccggtcgccgccatgatgctcgtcggtgcgatcctggccccgatcagcctcaagcgcatcggcatcaagcgcgccgtcatcgcaggcctgatctgcgtagcgctcggcttcaccctgctgtccctgacccacgtcggcatgacctacctgcagatgctgcccggcgcgatgttcttcgggctgggcgccggtctcctgatgcccgcagccacccaggccgtcatggattccctgccctcggagtcggagggtgccgggtcggccaccaacagcgcgctcatgcaggtgggcagtgcgatgggcgtggccatcaccggatcactgctggcgtggcgctaccgcgaggtgatgagtgccgacgccgcggtcaggggcctgggcgagccattgcactccgacatcctggcctcggtgggacgcgccttcgacctctcctcgggcggcgcgcaccccgacatcctggctgccctgaagcggggattcgtctcgggaatgcaggtcggcctgggggccagcgcagccgtcgtcgtgctcgcgacgatcgcggtcgcgatcttcttcccgcgccatccggtcgcgcccgatgaggccgagatcgaggactccgaaccgaaggcgtcgcccgccccctgaacccggcgacacggctgggccgccgacgagcggcggtgtatatagttggggtcaacgtttcaacgtgcccggggtcggtgtaagtccgaaccggcggtgacagtccgcgaaccgcggcccctcgtggggtccggccgaaccggtgggattccggtaccgacggtgaaagtccggaggggagagcgcgtgaacagtgcggcggacgatgccgcggccggcccgtgcgggtcggccgtgtgagtcgtgtgcagtcggactgtcgagcaccccggtccacgttgaccgaggaaggaatgtcgacagccgatggcctcatcacggttcacccgccatccagcacccaccggggtgcggatcggtgcccccctggtggtgggggcgctcctgctcctggcctggcatgcggtcgtgtcgacccacaccgtcccactcaccttgttgcccacgcccggctccgtgtggagccgactggtgcacgacatcgtccacggtgaattgttggcccgcacggccaccacgatctgggaagcggtcctgggctgcatcgtggccaccgtgttcgcccttcccgtcggctacctggtggcgcgcgttcggcttgccgaggccgccatatccccctacctggccgcctcgcaggcgatcccggccgtggcgttggcgcccctgctggtgatctgggtgggttacgggctcaccccgattgtcctgctgtgctccctgatcgtcttcttccccctgctgctgtccaccgtgctgggccttcgttcgattgaccacgaggtcgtcgaggcggccgagctcgacggggcctcgggatggcgcatgatccgctacatcgaggcgccgctgtcgcgggccgcacttctcagcggggtgcgcaatgggttcaccctgtcggtgaccggcgcggtggtcggcgagttcgtcatgggtggcaccgggctgggcctggtggtctccatgcaatcggcctcggccgataccaccggcctgttctccaccctcatcgtgctgtgcgtcctggcaatggtcatctacctcggcctgattgcggtcgagcgattcaccgatccctatcgcgtgccccgggcagcgcatcccgtgccactcgagacggcaccggacctgcgcttggtggccgccacgcaagcccatcaatcccacacgtcggcccagaaggagctcgtcgcatgacccgtcacagcagactcaccagattcctcctcgtgctccttgccctcaccctgggaactgccatgagcgcctgcgggaaccagtcgggttcctcgtcggcctcgtccagcgccggcatccccctcaccgtcgggctcacctacacccccgacatccagttctcaccgttctacgtcgcagtccagaagggctacttcgccgacgagggcctcaacgtgacattgcgccaccatggcgcctccgaatccctgatgggtgccctgcagtcgggcaccgaggacgtcgtctacgcgggcggtgacgagatgctcctgtcgcgctcccagggcgtcgacgtggtcaacttcgccaccatgtaccagagccatccggccgaattgatcgtgccgcagggctcgtccatctcctcattcgccgacctgcgtggacacagcatcggaatccccgggccattcggggagaactggtacgcattgctggccatgttgcggcaggcagggctgacccagggcgatgtgaacatccagtcaatcggctacacccagcaagccgcactcatgggcaacaaggtggatgccgtggtcggattctcgaacaacgatgccgtgaagttcggccaggccggattccccatccgcgagatcaggctcgatgcggccacaccgttggttgccctgggccttggggcctcgaaggcgaccgtcaccgacaagcaggaccagctgaaggccatgatgcgggcgctcgacaaggccgtcgcctactgcacttccgatcttgacggcacggtggccctgaccgagaagtacgtgccggccctgtcggacgatgcccaacgggcagcggccagggcaacgctggaggcgaccaacaagctctacggctcccagctcggcaagcaggacgcccagcgctggagcgacatggccaccttcatggccgagtcaggcatcatctccaagccggtggacgccaaggaatccttcgtgtcgctggtcggctgacacccacggcgacggggaacccggcccggtgcccaccacgcgtgggtaccgggccgtgccgtcgcggggttactaaccttgtggtgttcgtgaatgaccagggaaatgagaagaacgtgacacgcatctgctccacgaccggggcggccgccaccatggtgccggcaggcggtccggcgcgatggggcatccgggcgatggcgacgacgcggcatccgcgtcgcgggggataccgggcatgacgtcgagcaggcaccagtacctcccacccacccccgaggacatcgtcgagacgaagttcatggacctcttcgacaccccgggcgaacccatgcacctggtccgcggcggaaccctgccggggatcacggtggcctatgagacctacggcaccctcaacgagcgtcgtgacaacgccatctacatctgccatgcactcaccggggacgcccacgccgccggctaccacgagggcgacgatcgtccgggctggtgggatgccctcatcggacccggcaaggccatcgacaccgaccgctggttcgtcgtcgcctcgaacatcctgggcggctgctccggcaccaccggtcccagcagcgtcaaccccgagacgggcaagccctacgggctcgacttccccctgctcgacatgcacgacttcgtcgtcgtgcaccgcgccctgctcaccaagttgggggtgccgcatctgcacgcggcagtgggcgggtcgctggggggcatgcaggtcctggactgggccctgacccatcctgaggacatgaaccaggccgtcgtcattgccagctccagccgactgaccgcacagaacatcgcgttcagcgccgtcggccgtgaggccatcatgagcgacgagaacttcatgaacggcgccttcgccgagaatgacacgaatcccgatgtcggccttgcagtggcccggatgatggcccacatcacctacaccagcgaggaggggttcgaggagaagttcggcaggcgtccccagtttgacgcccaacagccgggcttcggtgtcgacttcgccgtcgagagctacctggaccatcaggcaagcagcttcatcgggcgcttcgatgccctgagctatctctacctgacccgcgtcatggactatttcaatcccttcgccgacgcccatgccctcgaccgtctcgtggcgactccggtgcgcttcctggtgatgagcttcgactccgactggcgcttcggcacggcccactcccggcgcatcgtgcggcgcctgcaggacgcggccctgccggtgagcttccgcgagatccatgcgccgtggggccacgattccttcctgctgcacatcccgccctaccttgactccgtgcgggccttcgtcgaacagcccgcggtgccccgacccacgattcgacgtcgacgactacggaagtggggacgatgagccagtcatcagcgcgtgattcggtcattggtggtgcgaaccgcctgggtgagggactgttgcgccaggacctgcagtcggtggcacggctcatccgtcccggcgagcgggtactcgacctcgggtgcggcaccggtgatctcctcgcctatctgatcggggcgatgggctgctccggcaccggggtggaacgcgaccccgatgcggtgttgcaggtcatcggcaggggagtgccactcatcgagctggacctcgacacccagctcgaggaattcggcgatgactccttcgacgtcgtggtgttgtcgcgcaccctgcaggcagtgctgaagcccaaggaagtgctgctccagatgcgacgcatcggccaacgcatgatcgtcacgatgccgaacttcggctactggcgccaccggctgcgcctactgaccggtcgcatgccccagagcaaggacctgccgtacacctggtacgacacccccaacctgcaccacaccacgctggtcacgctggaggaattgttcgacgactgcggcctggacattgagcgacgcatccccctggacggtgacggtcgccgcccgcgcctgccgctggaactgacccagcacacggcgaacgtgctggccggttcggcgatctacgtgctcacccgtcgcgacgccgccgacgccccggcctgatagcagcgcgccatccgcgcccgcgggggttacgccatttgaacccgtctcccgggcggcgccagatttgcgactatatggcccatggagtcgactgaccaacacattcttgcgctgttgtcgcgtgagggacgcatgtccttcaccgagatcgggcgcgaaaccggattgtcgacttcggcggcccaacaacgggtccgtcggctcgagcagcgtggcatcatcaccggctaccacgcacgcatcgacggtgcggccctgggccataccctcgccgcgttcatcgagatccgccccctggggcaggtcgatgagagcttggtcgacgtcctggcctcgatgcccgagatcgtcagttgctactcggtggccggggacgccagccacctgtgtctggccgaggtcacctccacgcaagagctggacgacctgctgacgcgcatccgcactgcggtcaacgtgtccacctcaaccaccgtcgtgctgcgtaccctgttccgtgatcggccccccatcgacgaccctgatgtgccggccgccaagcgctgaacgatcaaggccatgcgccccacctgcccacgctgaccgccccggtacaacgacgcgcggcggcgcttgtgcggtgctgttagcgtccctgatgtgaacacgacctccgacatcgtcgcagccgggtccccggtcgcactgcgcggctggtcgaggctgctgcggggtgaccatgcaccggtgcgattgcactgggcgcttgccagcctcctgtccctggtcgccggggcgctgctcgcgctgggattccaacccttcgggctgtggcccaccaccgtcgtcggcatcgcactgctcagctggctgtccgaccaggcccgtgcccgacgggtggcctggtgtgggctgttggccgggttggccctgtattcgatgacagtgtcgttccaggcagtggtggcatggtggctgccggtgctcatggtcccggtgcttgcctgctgggtcctcctcaccgccctggggcagcactatgtgcagttcctgcgggcgtggccactgtggtccgcgagcatctggaccctcgtggaggctctctccgcccgcttccccttcgggggcttcgcctgggaccggcttgcgttcaccctgcccgatcagccactgggtggttacctgtggctggtcggtgccgccggtgcgggctggctgctcgccctgtccggatgcctggtggtcgtggtggttcgcgccgtggttgctcgtgggggccgctggctgccccgtatggcggcgggcatcgccgcgatggggctgctcgccgccggcggggccgtcctgtctgccgtcccggcgaccactggcgcggggcgcggggtgacggttggtgtggtccagggcaatgtcgatggctccgccgggccccacacgatgggctatgcacgctcggtgaccgacaatcacctgtccgagacgatcatggcgatggctagggcccgcaccgggctcgacgcgatgcccgacttcctggcgtggccggagaactccacggacatggatcccaaccaggatgaggagacccaccagctcatcgccgacgcgcaggcgatcgccgcacgcccgatcctggtgggggccgtcaccctggggcccggcgatgatgggcgccagaccgctggcctgtggtgggacgccagcggcgagaccgcccgttacgcgaagcgcaatgccgtgccgttcggggagttcacccctctgaaggacctggtcttcgcgatcgcgccgatggccggggaggttggccgccagacgattccgggcaccgcgccgggcgtgatcaccgggacgctgcccgacggcagcagcgtgcgggtgggtgacatcatctgctacgaactcgccttcgattccaccgtctacgacacggtgcgccatggtgccgaggtggtcgtcgtgcaatccaacaatgcgacctacgccggcacgatgcagccacgccagcagtttgcgatcacccgtgtgcgggccatggaaatgcgtcgcgaggtggtcgtctccacgaccagctcgctgtcgggcctgatcgacgcgcggggcagggtggtcgagcacagtcaggaggacaccgcctgggcgcgcaccttcaccgtgccgactcgtcagggggtgtcggcgggtgtgtccaccgggcctgcgttcgaggccattgcctgtgccgtcgcggccgtggccgtcgtggccggactggtcgccccacgtcgcgcccggcgtggcggatcgctacactgacgcgggtgtcggcgaccccgcccatgagctggtcggtgagtcgccaggggcactttctcactagtcatctgggcgaatggagcgtcatggtcgaccacagcgagtcgctcgacaaggttctggttatcatcccgacctacaacgaggcggaaaacatcgagtcgatcgtcgaacgactgaggcaggcagttccccaggccgatgccctcattgccgacgacaattccccggacggaaccggcgacatcgccgatcgcctggcagccgacgatgatcacatccacgtgctgcaccgggccggcaagcagggcctggccgccgcctacgtcgcaggtttccgctggggcctggaacgtggctatgacgtcctggtggagatggatgcggacggttcccaccagccgcaattcctgccgtcgatgctgaacgccctgcgcgatgctgacatggtcaagggttcacggtggatgcccggcggtgaagtcgtcgactacgacaagaagcgcgagtggctctcgcggctcgccaacatctgggtgcaggccagcatgaacatccccgtgcgcgacaccaccggcggtttcaatgccttccgggcctccgcactgcgaaagatgaacctggacaccatcgcgtcgaagggatacaccttccagatcgacctcacccgtcgcgtgcttgacgacggtgggatcgtgcgggaggtgcccatcagcttccccgaccgcgagaagggggagtccaagatgagtggatcgatcatcggcgaggcattgctgcgcaccacgcagtggggtgcccagcgtcggggtgcccaggtggcccaattcgcccgcgaagccgccgaccgggtggaaccgctggtcgaccgggtcaaggacaagctcgactgacgaacaagccaaaagggtggtgcccccgaccttggtcgggggcaccacccttttcaccgccgtattgcggcggttcgtcatgtcttcagtgggtctcagtaatgcggggactttcggacgacctcaagcctctcggcgagcaggtcctccagctccgacaccgaacgacgctccaggagcatgtcccagtgcgtgcggggcggcttgacctgcttgtcctctgccttcgtgccgtcgctacgggtggcaacggcaccgcaccgcgggcattcccattcggtgggtaggtccgcctccgtcgagaaggtgacctcgaaatgatgtcccttggggcatgtgaagcccagtaccttgcgggtggcgaactccacaccctcctcgtcctcgaagctcttggccccgagacccatgccgcgtaacgctcgatccgccatgctgtctccttttctgccgccgagtttcctgacctgtcgcgatcatcccatgactggccggggcgatggtcttatacacaacaaatcccggctcggggatgttccctcaccatagtgcgcgctcgcgggccacccggcgcagcacatcgatgcggttcgacacgatgccgtccactccactgtccatgagttgcaccatctcgtcggactggtcgatcgtccatacgtggatcctcatggcccgcgaagctgccacgcgcgccagattccgggtgagcaccggtatccccaccgcgccgaacgcctgggacgtggggatctggaagacctgcgcacccgagttgagcacccggggcagccagggcacataggcgctccacgccaccgcgcccacggacaccgacgtcgccacccgatcgcccatcagggcccggaacccggccagtcgacgcgggctgaagctggcgacgcacacccggtcctcggcccgatgggcccggatcgccgccgcaagcggggcgattgctcccgattccttgatgtcgatgttgatccgggtgttgggcagggcctcgaacacctcgtccatcgtcggaacgggttccgatccgccgatccgtgcccgacgcaccacccgccagggcagcccggccacggctccgtgcatatcagtgacccgatccagccgggtgtcgtgaagggcaaccagcacgccatccgccgtggcgtgcacgtctgtttccacgtaccggtatccgaggtcgttcaccgcatgctcgaaggcgagcaggctgttctcgaaccgggccgggaccaacgcatcccagcctccccgatgggccatcgccgcaaacggggcgtcaaagaattcgtagtcatcggcagtacggcgtcgggacaccacaccagtatggccggatcggcgagcccgggtcgggtggatgcccctcaaccccgcacgccgggcagcatggccaacgccgcgtgcaaccagcccggaagccatccgggcgagcccacgatgatcagtgccacatagccgagcagcaacactgccgccaggaatccgcagaccaggagggtcttgcgacgccgcgattggcgtccgaaggcccgcagcacgcccatcgcccggatggtgagcgaatgcgcccaccggaactcactggccagaatcgccatcccggccaggaacaggggaatcccaccgggcccgggtagccatccggtgaggccagcagcgatgatgaaggcaaatccgatgatcgccaccacgacgcggtaggccaacaatgccggcgggttggccctgatgcgtgcgcgccaggcgaagcgctcccggcgcggaatgtcgcgacgcggcagggccggtgagatgccatgggtcgccatcacggatgcgcgctgcctcagccgcgtcaagtgggcacaacgcagcgagcggtcggtcgacgtgagactcacatattccattctgcaggctggtcacgcagaatccacccttgaaccagcaatgggggaatgtcgggggtcaccagcgccgcagcgccggtgcgaccaggcggcacgacgaaccggagcgtccggccggtgaatgtcagaatgcagccatgactcgaatcctgtcggtccagtccgaagtctcctacggcttcgtcgggaactcggccgtcgtcttcgcactacgacggatcggcgtcgatgtgtggccggtcaacaccgtgcagttcagcaaccacaccggatatcccagctggcgtgggccgcggctgacaccgatcgatgaagccgagatcgttcgcggcctcgacgagttggggatcctggggcaactcgatggcgtcctcaccgggtacctgtcgggtccatcgatgggccggcagatcatggcggccgtgcagttggtgaagcgacggcgaccaaccgcactctattgctgtgatccggtgctgggggacgacgagaccggcttctatgcggcgcccgggacacttgagctgttccgcgaacaggcgctgccgctggcacaggtcatcacgccgaaccgcttcgagctggccgcattgaccaacctgccgacgagcagcctcgaggagatcctgatcgccgccgacaccctgctcgacgcggggccctccactgtcgtggtgacctcggtgccctcattgcgcccatcgcagggcgccggccacgacgaccggatcgcgatggtggccgtgcagcgcgacggcgcctggcaggtctccacgccccgcctgccgggatgcatccagatcagtcgtagaaggtctcgatgtcggcgcccagggcgttgagcctggccggcaggtcctcgtatccgcgattgatcacgtagacgtcgtgcagcacgctggttccggtggcggccagcatggccagcatgatggtgaccgcagggcgcagcgccgggggggagaccatctcgcgtccgcgccagcgggtcgggccctgcacgatgaggcggtgcgggtcgagcaactgcacgtgggccccgagctggttgagctggagcaggtggatcgcccggttctcgaacacccagtcatggatcatggtctggccgtgggccgtggcggccagcacggcgaagaagggaaggttgtcgatgttgaggccggggaagggcatcgggtggatcttgtccggcggggccttcaactcgctgggatagatcgtcaggtcgaccaggcgggtgagtccattgcccgacttgtactcgctgctcagcccgtagtgcaggcccatctcctcgccgaggatcgacagttcgatctcggtgaactcgatcggcacgcgggtgatggtgagttccgacttggtcaccacggcggcggtgatcaggctcatggcctcgatcgggtcctcactgatctcataggacacgtccatgctgggcgcctccgacaggccccggacggtgagggtggtggtacccacgccatcgatctccaccccgagcagcatcaggaaggcgcacaggtcctgcaccatgtagttggagctggcattgcggatgacactcacgcccggcgagaccgccgccgccatcagggtgttctccgtcaccgtgtcaccacgctcggtgagcacgatgtgccgggtgtccggcccggtgcgggtgacgctggcgcggtagaagccctcggtggccagcacgttgaccccgaagtggcgcagtgactgcatgtgcggttccacggtgcgcacgcccaggtcgcagccgcctgcgtaaggaaggcggaactctgagaagaaccgactgagtgggcccatgaacatcaggatcgaacgcgtccggcgcgctgctgcgacgtccatgttctccaggtcaagggtctccgggcgctgcagggtgaggtccttgccgtcaggcgaccaactggcgtccactccgatgctcgtgagcacctccagcaggcggttgacctcctcgatgtgcgctattcccttcagcaccgtgcgcccctggttgagcaggcaggcacacagcagggccactgcggcgttcttgctcgaccgggtctcgatggaccctgacaggtgggtctcgccaccgatccggaagttgagggtgctggagttccccggcacgatgaggggagactcgagcgccccggcgatccggttgatcgtctcgagggagaggttctggtgcccggactcgatcctgtggatcgcgctctggctggtgctgagttcttcagcgagctgattctgcgtcatgccgcgctgcttgcgcgcgtcgcggatgagccggccgatcctggcgggcgtagtttcctgagtcacgaagaggattctaactcagatgtgagataaacagccgatgggggctcgtgtttccaggtgtgtcgcgcgtggggctgctcccgcccacagcgaaacgtcgaatccgtccggtcccacgccgcgcgccatcctctacagtgacgaacatgagcgctcattacgatgtcgttgtactcggtgcagggcccggcggctacgtcgccgcaatccgggccgcccagcttgggctgaagaccgcaatcattgagaagaagtggtggggtggcgtctgtctgaacgtcggctgcatccccaccaaggcactgctgcgcaacgctgagctggcgcacctggtgcagaaggaggccgacaccttcggcatcagcggacaggtcagcttcgactacggcaaggccttcacccgcagccgccaggtcagtgagcgaatggtcaagggcgtccattacctcatgaagaagaacaagatcaccgagtacaacgggtgggccacgttcagcgacgcacgcaccctgcagcttgcgggcaacgacgggaccaccgacaccatcaccttcgacaacgtgatcctcgacaccggtgccaccgtgaagatgctgccgggcacctcgaagtcggccaatgtgctcagctacgaggagctgatcatgtccgattcgcttcccgagtccatcatcatcggcggttcgggcgctatcggcaccgagttcgcctatgtgctcaacagctacggcgtcgatgtcaccatcgtcgagttcctcgaccgcatggtgcccaacgaggacgccgacatctccaaggagctgacccgccagtacaagaagctcggcatcaaggtgctcaccagcacggccgtgcagtcggtggtcgacaccggcagtggcgtggacgtcacgattgccccggccgcaggcggggaggcacaggtgctgcatgccgacaagatgctgcaggcgatgggcttcgcaccgcgtaccgagggctatgggctcgagaacaccggcgtggcgctgaccgaccgtggcgctgtcgccatcgacgacttctgccgcaccaatgtgcccggcgtgtacgccatcggagacgtcaccgccaagatgatgctggcccatacggccgaggcacagggcgtggtcgcggccgagacgatcgccggcgccgagacgatggccgtggactaccgcatgattccgcgcgccacctactgccagccccagatcgccagcttcggactcaccgaacagcaggccagggacgagggctacgacgtcaaggtcgccaagttcccgttctccgccaacggcaaggcggtcggcatgggcgcccccgatgggttcgtgaagatcgtggccgacggccgctacaacgagatcctgggcgcgcacatgatcggcgagggcgtcaccgagctgctgcccgagctgaccctggcgcagaagttcgatctgaccaccgaggagatctcccgcaacatccactcgcacccgacgctgggtgaggccgtcaaggaggccgccgagggcattgaggggcatatgacgaatctgtgatcactgagtagtgttcacagacgaatcctggggccacaggggtacgtctcacagtttgaatcactgggagcgtttgcccttgtggccctagatttcgcacggacaccatgaggggtgccgggcttgttcaatctgtttccccagcgggggagcacagccgtccagcggtgctggagctgtcacgggggtggcgcaatgagacgtgcggtcagtgcggtgttggccgccgtggtgggcctgggcatggtggcctgcggacccaacaaggtgaattcggcggtcggcgacacgatcaagatcggcgtcaactatgagctgtcgggcaccgtggcctcctatggctcatcgaacgtcaagggcatcgagatggccattgacgagatcaacgccgctgggggagtgcggggcaagcagctcaaggaggtcaagtacgactcgaagtccgagccggccgaggccaccacgctggcgacaaagctgaccagtcaggacaaggtcgtcaccatcatcgggccggccacttccgggtccttcaaggcaaccatccccgtggccaacaagcacgaggtgccggtggtctccgggtcggcgaccgccaacgatgcaaccgtcctgcacggcaaggtgcagccgtatgccttccgcacctgcttctccgacaactaccagggcaccgggatggccgattacgcggtcaagcgcatgaaggccaccagggcagtcatcatcaaggacaactcctcggactactccaagggcctggccgagagcttccgccagaagatgaccgaggagggtggcaccatcaccaatgaggtcacctacaacaccggtgaccaggacttcaatgcgatcctgaccagcatcaagaaccagaagttcgatgtgatctacctgcccggctattacgccgaggccggcctcatcatcaagcaggcccgcgcgcagggcatcgatacgccgatccttggtggcgacggctgggacagcccgaagctggaggacctggccggggactccgccctgaacaatgtcttcttctccaaccactactcctcgctggacccctcggcccaggtgcaggacttcatcaaggcctacaaggcccgctacggagcggaacccgatgccttcaatgcgctgggctatgacacggccaagttcgtggcggactcgatcaaccgggccagcagcatcgacggaccgtcgatcgcacaggccatggccacgaccacgaacttcagcggcgtcaccggcaccttcagcatggacgccaaccataaccccgtgaagtcaatcgtcgtggtggggctgacaaacggcaagcaggcatccagcgagagctacaaggcctcctgaggcaaacaggtcgggcccgacaacaggacaaacacaggggcgtgcagtgcgacaccaatatggtcgcgccgcgacgtgcggaggggagagggatcggtggatcagatcctgcaacagctggtgaatggggcgtcactcggcagtgtctacgccctgatcgccctcggctatacgatgatctacggcatcatccagctgatcaacttcgcccacggtgacgtgtacatggtgggcgcctacgtgggttatgcatgcatggcgcacttccacctgggcttcttcacctcgttggtggtggcgatggccgtgtgcaccgtgctcggcgtcgtgatcgaacgtgtcgcctacaagccgctgcgcaaatcaagtcgaatagccgtgctcatcacggccatcggggtgagcttcctcctcgagtacaccatgatgttcttcgtcggggccgatgtgcgctcctacccgccgctgccacattggatgcaggtctcatggcacctgggcggggtgatcatcacctccctgcaggtgctgatcttcgccatcgccgtggccctcatgatcgccctgcaactcatcgtgcggcgcacgcggctgggcaaggcgatgcgtgccgtctcccaggacgccgatgcggcccgcctcatgggcatcaatgtgaacaacacgatctcgttcaccttcgcgctggggtcggcgctcgccggcgccgccggagtgctcgtggcggtgtactacaactcgatcaatccgctgatgggcatggtgcccggcctgaaggcgttcatcgccgcagtcctcggcggaatcggactgctgcccggggcactgatcggcggttacttcatcggcgtggtcgagaccttcgtgtcgggcaccggcttctcgacgttcaaggacgccgtcgtctatgcgctgttgatcatcatcctcgtcgtcaaaccatccggcctgctcggcaagaacgagaaggagaaggtgtgaccatgagtggctcccagacccttgggctcgacacgtccacgaccccctcacgttccttcgtgcacgccagttggttccgcaagacggtgctgctcgcggccgtctacctggtggtgctcctgctcgtccaggccgatgtgatcaatgactaccgcctgatcaccatcgccaccatctgcatcaacatcgtgctcgccaccagcctcaacctgatcaccggtttcaccggacagttctcgttgggtcacgccgggttcatggcgatcggcgcctatgtgacggccctggtcaccattcagatcgactcggtgtggggattcgtcctgggcctgttggccggtgccctgctggcctccctggtcgggctgttaatcggcctgccgaccctgcggctgcgcggcgactatctcgccatcgtcaccctcggcatggccgagatcatccgcatcgtcctgctcaacctcaaggtgaccaatggtgctgctggcctccagggcattccccagttcgtcaactggacctggctgttcatcctcaccgccggcagcgtcgtgctgatctcgaactacctgcattcgcgccacgggcgggattcgatcgccgtgcgcgaggacgagatcgccgccgagtccatcggcgtgaactccacccgcaccaagacgatgagcttcatggtgggtgccttcttcggtggcatcgccggggggatgtacgcgtcgttcttctacttcatcaagccggacaccttcaacttcatgaagtcggtcgacatcctggtgatcgtggtgctgggcggactcgggtccctgtcgggatcggtcatcgcggcaatcctgctggccatcgtgtcaacgctgctccagcccttccccgagattcgcatgatcctgtacgcgctgatcctgatcctcatcatgatcttccgaccacaaggactcatgggctcgcgtgagctcagcgtcaagctgttctcgcgcctgatccccggccgcgcacgaaaggagcggacgcgatgagccaacccatcctcaccgttgagcacctgaccaggaacttcgggggactggcggcgctgtccgatatgtccatgacgctgaaccgcggcgagctggtggggctcatcggcccgaacggtgccggcaagacgaccgtgttcaacatgctcaccggtgtctatgccccttccagcggctccatcaccttcgacgagcacggcactgcggtggagctcggcgggcgcaagcccaatgcgatctgtcgggccggtgtggcacgcaccttccagaacatccgactgttcaaggaactgacggtgctggagaatgtggtcagcgccatgcagttgcaggagagctacggcctgctcgccaccttcgggcacacgccggtctggaagcgcagcgaggccgacatccggcagcgcagccgcgagatgctcggcatcctgggactggcggacaaggaatcagagctggcccgcaaccttccctacggcgaccagcgacacctggagatcgcgcgggcccttgccaccgccccctcgctgttgctgctggacgagcccgcggccggcatgaatcccgccgagaccgccgagctcaccacgctgatcagctggatccgtgagaactttgacctgacgatcctgctcatcgaacacgacatgagcctggtgatgaccatctgcgagcgtatctacgtgctcgaccacggcatcgtgatcgcctcgggaacccccgatgaggtgcagcacgatccacaggtgatcgaggcatacctgggccaggaggccagcgatgtttgagatccatgacctccaggtcaacttcggcggaatccaggcgctcaagggcatctcgctgagtgtcgaggacggccagatcgtcaccctgatcggtgccaatggggcgggcaagaccacgaccctgcgcactgcatcgggcctggagcgccccagtggcggcacgatcaccctggccggccaggacatcaccagggcttccgcacgcgaacgcgtcaagcagggactcgtccaggttcccgaggggcgtcgcgtcttccccaagatgtcggtgctggagaacctcgaactgggcgccttcctgcgcaaggatcgggcggggatcacccgggacctgcgcgatgtctacgaacggttccccgtgctggctgatcggctcaagcaacaggccggcaccctgtcgggcggcgagcaacagatgctggccatgggacgcgccctgatgagccgcccgaagatgctgctcctcgatgaaccgtcaatgggcctggcccccttgttcgtgcaggaaatcttcgacatcatcaaggcgatcaacgaagccggcaccaccgtcctgctggtggagcagaatgcaaatatggcccttcagatcgccgatcacgcatatgtgatggagactggcagaatcgtcctgtccggcaccgcagccgagctgtctgccagcgacgagatcaagcgcgcctacctgggaggctgagatgttcatccgagaccacatgacggcgaatcccttcaccgtcacccccgacgacaccgttcccaaggccgtcgaggtcatgaagctcaaccatgtgcgccacctgccggtgctgcgcgacggcaaggtggtcggggtgatcgcaaactccgacatcgccaaggcctcaccgtcccaggccaccagcttcagtatcggcgagatcacctacctcttcagcaagctgaaggtcggcaaggtcatgagccgcgacgtctacaccatcgcggccgatgccctcctcgaacaggccgccgtgctcatgcgcgaccacaagatcgagatggtcccggtgatggagggcgacaagctggtcggggtgatcaccgagagcgacatcctcgattccttcgtcgacatcatgggaatgcggatgcgtggcacgcgactggtcctcgaggcgaccgatgcgccgggccagctgtcgaggatcaccggcctggtggccgaccacggcatgaatatcacccacctggcggtgtacccgggctctggcaccagccagatcgtcctgggggtgaacagcctgaacaccgccgacctggaaacccaattggtcgggctgggctatcgggtgatcgcgcggctgcgcaacgagccgggcaaggactgagcagacagccttccggcgtcggccaccggcctcaccggtcgtcggtgaccgtgtggtgacggctggcagggcccgtgcgccatgacgcgacgctggagacgcccgcagccttcgcagcactcacggcacggggcacgtgggtctcctgctgggccagggtggacacgtcgatgaccatcggtaggttcaccccggtcaccacatcgctgtccaggtgacggctgcaccagcgcacggccgcgttgtaggggctgccacccagcaggtcgaccaggaagatcacgcccgcggcgtccttggtcgcatcctggaccgaacgatagagggcgtgggcgtcgccttcggggtcgaaatcaatcgccaccacatcaggattcgagcccaggatcatcgcggtggacttcaccaaggagcttgcaaggttcccgtgggcagccacgacgacacgaatcacgaaagttcctccttgaaccgaccggctcatggtaccgctaacatgccccgatcccggagcggacgaggcgggggaggccgccacgggagaactcccaatccccgcaggccggcgagcacgaaccaccacccattgttcggaaccttcgtgattcgggaccttcgtgccgcagactgcccgggagtgccgggcacgtgggcacgcatcaaatcccgggcggtggttcttcctcggtcggcggccgggacgagccccgcggcatccaccgcgaaggcagaagcgggctccatgcacgaggtgacacatgcgcgatgaaagggggtggacgatgatcaggaagaccggtgacgtttgaccgataatgtacattatgtcagaacggggaaatttgggcccgtcacgctcgcagcgcctgcctcccccgggatcggctccacgaggagtggccggcctgccgggatagcctgagatcatgacgacggatggattgctgcgcacggcttcggtcgacgaactgaccgcacgtcagcagatgctcagggccagggcggcacgttccggggttgatgcggtggtgatcagcaccggtgccgacatgcgctatctgctgggccggagccagggttcccacgaacgactcaccgccctcgtggtgcccaccaaggggtcggccttcctgatcgtgcccgagctggagaggcccgggtgggagggatcatcggccgagtccatggggctcgagatgtccacctggcccgatggcgacagcccctaccggctccttgccgcacgcctgggcccgatcgcggagttggccgtggacgatgtgatgcccgtccggcatgcccacgagatccggacggccgtcgattgccgggtggaacctgccggcgaactgatcgggggcatgcgcgtggtgaagaccgacgaggagatcacggcgctgaccgcggtcgccgccgccatcgaccgggtgcaccgccgtgtccatgagtggttgcggccggggcggaccgaacggcaggtcggtgctgacatcgccgcggcgatcgtcgcggagggccatcagcgccctgatttcgtgattgtcgggtccggccccaacggggcaagtccacacctggaacaaaccgaccgcgtgatcggtgccggcgacccggtcgtggtcgatatcggaggccccgcccccagcggctacttcagtgattccacgcgcacctactgcgttggctcccccggcgatcccgagttcgccacggtgcacgacatcgtccgaacggcccagcagaaggcctttgagacggcgcgggcgggtgtgagtgccgcggcggttgatcaggcggcccgaaccgtgatcgagcaggcggggtatggaccatatttcatcacccgcacggggcacggcatcggactggaggtgcacgaggagccctacatcgtccgtggcgatgaccggctgctctcccccggcatggccttctccatcgagccgggcatctacctgcccggacgcttcggggtacgcatcgaggacatcgtgctcattggtgccgacggctcccccgtccgcctcaaccactcgcccaccaggtgggagttgccctgagcatcacatgatgcgccctcgggtgcggctcagctgaggccggtgcgcgggtacagccactcgaggccggcccccagtcccccacgcacggcgggcatcaggtggccggcgttctccaggggatcgaccttgacggtcatgcccgctgcagcggcctgctgggccaattcctgcaggctggggccgaaatagtggtcgtcggtgccatatgagaagaatgcccaggtatcggggtaatgattctttgcgaggatcgtggatggcttcaccgcatcataggcaccctgatctccatggaacacattcgccagcacatctggggcgtggtcaaatccgggatacgcctcccccgagacactcatcacatttccccacaggtccggatgctttgccccgaaactcaccgcgcactgccccccctgtgaatatccaccaaccgtccagtcctgacggtcggtcgacacattgaggttctcgcggacccaattcaccacatctgtattgatataggtctcaacattcccgaatttctgcgtgtcgaggcacagggtgtccacattgggattccccaactgatccacgaacacgacaatcggggacaatccggctcttcacgattgagggtgtagttggggtctgaatcctccggcctcgaggagactgcgggcaatgtagttcgtcaggtttcggaagcccaaggctgagccgcgcaggtgttccagtcggccattgagggcttctgtcgggccgttggaggtgtgggggcgctcgaagtaggccaggacgtctgtggcgcgccgcttgagggtgcgccccagggtgatgatctcagcgagggcggcgggaacgccgcggctgatgacctcgatgacgtgggccagctgggctcgcccggccttggggtcgggatcgcggtaggcggccacgatcttctggtagatgccccaggtggcttccaccccgacgtgagcgtcctgggcgaagacgccctccaggcgggtgcgttgcttgtctgtgaggagatccatcccggtgtgcagggtcttgcgcaccccgtacagggggtccccggaccggcctcgatgtccggtggtgtcttgctggacgcgctggcggcagtggtccagggcatcgccggcgagctggacgacgtggaagggatccatgacctccaccgcgtcggggagttcttccttcgctgcggtcttgaacccggtgaagccgtccatggcgaccacctcaatccggtcgcgccacgcagggtcttgctggctgagccactccttgaaggccttcttggagcggccctccaccatgtccaacaacctggcaggaccccttccctcgcgcagcggggtgaggtcgatgatcacggtgacgaacttgtcgcccctgcgcgtgtgccgccacacgtgctcgtccaccccgatcgtggtcacaccctcgaagcgatgctcatcgttgatgaggaccctgcgtccctcctccaggacggaggtgttggcgcagtcccaggacacgcccagaccctcagcgacccgggcgacggtgaggtgttggacgacgatgccttccagggcccaacgcagtccgccccgggacagtttcgagcgcggctgggccgccccagtggtgtcctgcctccacacacgcccacaccccgaacagcggtagcgacgcactcgcaccaccagtgtcaccggtctccagcccgagggctcgtgggcgaggcgacggaccacggtgtcgcgggggatcccttcgcacccacactcgcgacaccaccggtcatcgtccaccacccggcaggccacctcgcagcgatccgggaggactctctggcccaccaccacgaggccgaggtcatccaggcgggcgaacgtggtcagatcgggggcagcaaaggtagcgtgggacacgtcggggtctttcagatgggcagcgtaggaactcccatcatcggaagaccccgaccctcacacccaccccgacacgccagccagactcaaccccccgctacaccccggatcgcgaagagccgacaatccgttgtgggcggcggcaatgccgtccagctggtccttgaacagcggggcgtcgggagtccccggctgacccatcatgaacaccaccacgggcagcttcggcgcattcgccaccagcgctgcgggcggcagatagatactcgccgagcgggggtggaatcccgagaccttgccgggcaggtactggttaccggcctggcccttggccggcatgtccgccggtgccacccagtgcgcaccgtcgaagtcctcgtgatgcgacggactcgacgtcggctgtgacggaagggtgatcggattcgccggcacccgaccgagcaacgcacccagcgtggtgttgatctggtaggccttgttgacggccagcacggtggcccccaacagcaccacggctgccaggacggccgccaccttgcgacgccaggtcgaccaccggaaatttgcgaccacaaggccgaggccgatgaagaaggccaccacccagatccgtcccagcatgggcatcggccccagggtcaggttgagaaccttctcgcccaggaaccaggcgatcacgccgaccacggctccgacgccggcgcagatcgccaccgtcctggtccaaccacggtgtcgcctgatcaccagccaggccaccacgagcgccgcaatgaccgcagcgggaatgagttccttgggaccgacgatattgcgcgccatcaaccaattgacaaaactgcgccacgttcgcgacaactgcgtcatgtatctgatccattctcgtcggttgatccacgccgaccccggaagtacttgatgatccggctgattcgaactgtcggttccgtggtcacatacgcggtcgtcagcgcacgaccgatcttcggaagatcagtggggtcctggtacaccaggtagagcggatggaactccggtccgaatttcgccttgaaatggtgcagcgaggtgaatccataatatctttcaagcagccccgagacacttccgagtccctggtacagggtccctgagacggcatcggtgaccggtggctgatcgcgtggctccatcgccagcggcgagcccgacaggctcaccacctcgaatccctcatcctggaactgcaggatcgccttcgagatgagcaactcgatggtggagtggaagaccccggtggccccctcgcggcgtcgcatcacgtcgaggagccagccgatgaccttttcgtcacggtagagcggcaaccaggaggcaaccccatggacatgtccgctctcgtcgacggccagctcacagcggacctccggatcctccatctcggcgaacccgcccagggtgaacccgaggggcgggagggtctgttggcgttgccagccctcgaccacttcacggatctcgcggcgccgttccggggagcactgcgccagcctggtccacacgatgctgatgtcctcgcgctttgcgcgattcatggcggtgcgcaggtcctggaagcgcttccccttgaaggccacctcacccaactcgatgcgtgattcctcggcgatctggagtgcccgccatccgaagccacgcgcctggcgggcgaagtcggcaccgaccgaatagaagcagtaggtcagcccaccctcgtccgaccgtcgggcgaagctcagggcggtggccatcgggtcctgaccgatcggctcccccagggtcactgccactccgtgggcaaggcggtagcccaccacgccctcgagcgcggggccataccagtggcgcactccggtccactgggtcatccaggcgaagatgccacctccgtagcgggtgatcagcccccgcagccgcttcgcatcggccccggccagctcccgcgggtccacctgcatgttgcgcgccatgagcaccagtgccacgaacatcaccagcggccccgtcagataggccaggctctgcgtggtggtgctggcgggcgacagcgttgaccccagcgacaggagcacttccaatccgaacacccgggtgaccacatcgtgcagcagggccacgacggaggcctgcggggaccattgcgcagccagcaacatgccaacgaccacatagacgatcgtggcgacgccgaacagcgcgacgtagcgcacgagctggcccactgcgacccgccggggcaggcgcaccgggaacagccgcaccgtgaggagcaacaggacgaccacgccgacggggatcgcagccggtaggaaggccatgaccatgcggacgaagaagatgaagcccgtgctcgcgtgggtctggcgccatgccagctccgccttggcccggaccaccgtggccgtcacggtcgtggccgccatggccgcctccaccaggagcgcgcagaaccaggcggaccggcgggcccgtacgagtcccaggcagagcaccagcatgatgacggcgggcaacacgctcatgagcaggacgggccagccgaggttctggtgaaggtgggccagggtgcaggcatgtgagctggccagtcggcagatcgcatgtgcctcgcgtgactcgaattgcccggttcggacgtagccggcgatctcctccaacgggccggcagcacgcgtcgaccatgcggccagaaggggccccagtgacgcacaggcgatcaccagggacaccaggacgcggcgctcacgaaagcgcggccacaggtcgaagcgttctgcgccgcgccaccagaaggcgccgatgaccaggccggcgaccatcgatccgagggtcatggcagcgaaggtcgaggcgtcgtagaagcccagggtgagggtgatcgccagaccgatccatcgcgtgcggacacgccacaggtggttgaacccccccgacgccgccatggcaacgcccaggagcgcgggaatggccccattggaccagccattgaccaacgcgtctgaccagcgcggccactgggatgcgatcagcgatgcgaagcccagggtgagcccggtcgcgacgacatggcagcacaccagggcggccacgaaccgccacgcaccgagccggcgttcgatatagggaaacaccgagaccatcagcaccagcagcgcaacggtcgcaccgatcgagccggggtccaccagcatgaccagcccacgcgccacattcgaggctccgccgatgtgggcggttcccccgccggtgcgcacccagtgcctgagccactcccctgccggggacaactgccatgcgatggtcgccacgccgagcacggcgagcaccatgcacacgggcgcatggatcagtcgcctccacaagccccgtgcaatgctccggacgccggtctcagcgtgcggggttcgttggctcacgacaaccgataatagtcaggcccttcccgcccaacggcggcggcaccgtccgggcgacgacggttcgcgccggtcacactgtgatcggcgggggcgtcacgggccgggcgccgacgcgccgctactggagggccttgaggatcagctcccgcacgcgggcggcgtcagcctgtccgtgcatctgcttcatcacggcaccgatgagggctccggcggcctggaccttcccgccacggatcttgtccgccacgcccgggttggccgcaatggcctcgtccacggcgcgcgagagcgtgtcgtcatcggagacgacctccagtccgcgggccttgacgatctcggcgggttcgccctcccccgcgagcacggcctcgatgacctgtcgggccatcttgtcggtgagcttgcccgagtccaccagtttcccgacctgcgccacctggacggggctgatgggcaattcggccagttcgacctcggtctcattggcccgtcgcgacagctctcccagccaccacttgcgtgccgcagcctgatcggccccggccaccacggtggcctcgatcagtgccagggcaccctcgttcccctcgatgtcgcgcatctcgaggtcggtcaatccccattccttctgcagccgcgcggccttcaccgcgggaagctccggcagggtcttgcgcagttcgtccacccattgcgcacttgcctcgacgggcacgaggtctggatccggtaggtagcggtagtcctcggcctcctccttcgagcgtccggcggtggtgaagcccccggactcattccacatccgggtctcctgcttgacgcgtccaccatcggccagcacggctccctgccgacagatctcgtagcgcagggccgcctcgacgctgcgcagggagttcacgttcttggtctcggttcgggtgcccagttcggtcgatcccttgggcatgagcgacacattggcgtcgcagcgcaactggccctgttccatgcgtcccgcactcacgtcgagggcacgcaccatgtcgcgcagatagctcatatatgcccgcgccacctccgggccacgagtgcccgtgccgtagaccggcttcgtgacgatctcaatgagcggaacgcccgcacggttgtagtccatcagggagtagtccgatccctggatgcgcccggtggcgccaccgacatgcagggacttcccggcgtcctcctccatgtgggcgcgctcgatcggcaccgtgtactgcgtgccgtcgacgtccagtcggacctcgccctcataggcaatgggctcgtcgtactggctgatctggtagttcttcggcatgtccgggtagaaatagtgcttgcgggcgaaccggcaccagcttgcgatggaacagcccagcgacaggccgatcctgatggccgactcgactgccttgccattgaccaccggcagcgcaccgggcaggcccaggcacaccgggcaggtatgggtattcggttcggcgccgaacttcgtggagcagccgcaccacatcttcgattcggtgttgagctcgacatgcacctcgaggcccagcaccacgtcgaagcgcgccatgacctcgtcgtagtccatcaacctgtcatcgctgtattgcacgctcacttcgcgtccttccccatgctcaccagtgagccgggcagcgctgccgcccggtcggacaatgccgcgtcgtatcccggaccgacaaggcgctcgagcgcggcacccacccggtagacctgatcatcgcccagggccggcgccatcacttggaatcccaccggcagaccgtcgtcgggtgacgcgccacaggggaaggagccggcagcgatgcctgccaggttgctgggaatcgtgcacaggtcacccatgtacatggccagcggatcgtcaaccttctcgccgagcttgaacgccgtcgtgggagcgaccggggacaccagcgcatcgacccggtcaaaggcggccgcaaaatcgcgggcaatgagggtacgcatcttctgggcggagccgtagtaggcgtcgtagtacccggcggacagggcataggtgcccaggatgatccgacgcttcacctccgcgccgaatccctgaccgcgactgagccgcatcacctgctcaacggagtgatggccgtcgtcgcccacccgcagcccgtagcgcattgcgtcgtagcgggcgaggttgctggacagctcactgggcatgatcaggtagtaggtggccagcgcttgttcgaacctcgggcagctgacctcgatcacctcggcgccggccgcctcgagctgggccaccgcctcaccgaagcgcgcctcgacgccgggcgcatagccctcaccaccgagctcacgcaccacgccgatgcgcattccggtcacgtcggcgcgttccgcggcctggcggacgggcggcaccggacgatcaagcgacgttgagtcctgggggtcatagccggcgatcacctggtggagggccgccgcatcggcggcgttgcgggcacagggcccacactgatcaaggctcgaggccatggcgatgatcccgaatctgctgacaccgccataggtgggcttgacacccaccgtgccggtcattgctgcgggctgacgaatcgatccgccggtgtcggtgccgatcgccaggggcgcctcgcatgccgccagtgcggccgccgagccaccaccggaaccaccgggtatccgctcgaggtcccacgggttgtgggtggggccataaccggaggactcggtggacgatccgctggcgaattcatccaggttggtcttcccaaggatcaccagtccgcctgcctgcaggcgacgcacgacggtggcgtcatagggcgacatccacccctccaggatgcgtgatgcggccgtcgtgggaaggccctggtaacacaggaggtccttcacggcgaccggcacgcccgccagcggcgagaggcgctcgccggcagcgatctgtgcgtcgacctcgccggcacggcgcagggccagatcacgatcgacggccaggaaggcgtggaccgcgggctcgacagcatcgatctggtcaaggaaggccccggtgacttcggtgctggactgttcgcgggcggcgatccgccgaccgagttccagcgccggggtggtcaggatgtcgttggtcactgtggcctcactgctcatcggagtcatcaaggatgcgaggcacccggaagcgttggtcctgctcggcgggcgcgctgcgcaacatctcgccggcgggccacgagagcttcatcgcatcggaccggaaggcgttggtgatcggtacggcatgtgatgtcggggggatgtcctcgtcggccacttcggcgacgccggccacggcgttcaggatgacgtccagctggggtgcgagttcggccaactcgtcgtcggtcaattcgatgcgcgccaggtcggccaaccggctgacgtcatgcggcgtgagagccacgttcgttactccttcatgtgtcgatgccgcggcgctggccgcaggggtgagcgttacgactcccccgccgagggaggatgaccacctcggtgacgtggccatcctaacgacaaccgggtgctgggcgacggcgcctccagcgcatgcggcggacgccggcgaaacaagacattaacgcggacggggttccaaccggaggatgatttgagacaattgggtcgtgttgttgctgcgcgtagaactgcccgatcgacccggcgccctgggtcaggttgccaccgccatgggcggtgtcggcgctgacatcagcgccatcgagatcgtggagcgccgttcggatggtcacgtgatcgacgatttcatcctggccatgcctccgggatcgctcgccgagacgatcatcaatgcctgtgccgagatgcccgacgtgaaggtgctctggttgtcgcgctatcccgaccaatggaacctcgaaagcgacatcgaggtgatcaaccggatgtcgaagcagcgggcccgcgcagcggagatcctgaccgaggacgcacccacggtcttccgttgcgaatgggcgagtctggtcgaccgcaagggactcaaggtgttgcacgccaccgagcgggcgcccgagttcacagccgaccaattgcgcgagctcggtgacttggcaaaggcgggtcgccacgcaatgggcgaggactggatgcccgactggggcgatgtggcggtcgcggcggcgccggttgatgaggatcgcacactgctggtcggccgtcagggcgggcccgagttcctggattcagagttgttccgcctcgagcacttggcgtcggtcgcccgagcctgacgccgtcagccgccgagaattcagtagccgagaagtttgtagaacacgtacatcaggaccccgatggcggtggtggccgccaccagcgcgatactcacccatatccgcaacctcttcttctgggccgtcgtgggcacttggtcaggtccccactcgccgatgctgggacgcgcccgcaccggggcaccgccggtcaggtcgagatcagaggagaacctgcgcataaaggtgatcctaaccaccgtccctgagcgcgcggcatccgcgccgtatggcgcaagcacgccgtgggtcagccgcgggcaacagcggccaggtcggccagcgcgcggaaggcatcgaccgggtcggcggacgccaggccgcacgcgggtgtgatcgccaggcgcctgtccgcgggaccgccggggtcggcctccagcttcctacggcactcgtcgagtgctcccctgatcgcatcaactccgaacccgggggtggatgtggacaacaggccgagccacagcgcgtggtccatgccgggccccggttctgcggagaaccattgtgccaacgcgtcccatgagccagcgtccaggcgttgggtgtcgatgctcagtgcgtccggaaccgcggccgccagttccgtcaggggtgggcggtcagcgcagcagtgaatcaccacgatgtcctcggccgccccacgcgtggcgtcaacgcaggcacccaaggattcctgtacctcctgggcctcaaccgccggcaggcggcgacggcccgactcgtcagggatcgccccggccagcacggccggcaacgccggctcatcgatctgcaccgccaggggacgatccagctgactgcgagtatgggcgatgcggtccacggcccccgccagccacgcctgggccaggtcccgacgcgcgccggcgtcacccacggcacgtccgccacggacgaggtcgagactggccagcagcgtccagggaccggccatcgtgagcgtaagggtcccctgccagtcctcgatcacctcagcggtcatggtcacgtcgtcgttgaacagggcggcggcccttctgccaacaagggaaggtcccggggcgaggcgccaccccgagggtcgccgatcgaacggcatatcgggcaacatggcggccgtgcgggcaatcatcgaggcctgcgggccccggtcgggcagctcgacgatgggagccctgtcgggcagttccccgaggactgcgcgcgcggtggcgcgcaggtccgtgccggcgaacgagcccagggcggtggcgatcatggcttgatcctcgcatgtgagggggaggtcccgtcccccgtggccctattcgtgctcagggaccatggatgggccgggggcatgactggcaacgatctcggcagcgccgcgcacccgatcagcgtcatagaagacgatgaactgtccgggtgcaaccccggagacgggctcagcgaagtgcacgcgcagttgcccgtccacctcctcgaggcgcgccggcaccgcccgtccatgtgcccggaactgcacgagtccccgccagtgcgggccgagtggcatgccggtgtcggacaggtcttcgacatccacctgacccaccaacagctcgcgaccctggccgacgtgcaccgtgttggtcgcggcgtccagggcggtgacatagcgaggcttgccatcgtctgcgggtcgacgcaggccgagtcccttgcgctgccccacggtgaagtgctggattccgtggtgcgtgccgagcaccgtccccccgggcgtcgacgatgtctccctgccggtccgccagccggtcagcgaggaactcggcagctcctccctgggtgacaaagcaaatatcggtggagtccggcttgtgggccacgggaaggcccctgcgctcggcctcctcgcgcacctcgtctttggtggtcacggttccgagcgggaacaggcagtggcgaaggtcgtcctggctgagtacgcccagcacataggactgatccttgcgggtgttcgcagcccggtgcagcccgatgctgccgtccggggcgggctcgagacgggcgtagtggccagtggcgaccgcgtcgaagccctccgcgatcccgcgactcagcaatcccctgaacttgacctcccggttgcaccgcaggcaggggttgggggtgcgtccggccgcataggaagtcgtgaaatagtccaggacacggtcttcgaaacgatccctcagatcccacaccaccaaccggatacccacggcgtcagcgacggcccgggcatcgcgcgtctcggggaccgagccggcaccaagcagcaggtggacccccatggcctcatgcccggcctccaccacacgggccgcggtgactgcggaatccactccccccgacagggcaactgctacgcgcacgtacgctctcctcttcgcttggatgacggccccgcaggtgatgggctccttgactcgtcggtgcgaagcacctccgcagccgggcaacaagccggacactacggaagacgtcgctcagcccatggtcgccgggtagtcgataaactgaattctaggcgtgggccgctcccgtggcaccacgccgcgttgccgtgaagaccgtgacgcacctgaagcacacgccaccaaccgggtggcgcgtaggaagtacacttggatgactgagatcaaccgttccgatgccgcacacgtgctgggagcccatctgtcggcagatggctgccatttcgggctgtgggcaccccgagccgagagagttgagctcgcgctggttgatggcgatggctccacccaacgcaatgtcgacatgaccccggacggaggtgcctggtcggtcttcgtgcccgatgtggtggcaggccaacgttatggcttccgcgtacatgcccagtgggacccggatcaggggctgcgagccaatcccgccaagctcctcgtcgacccctatgcccgtgcgatcacggcgggcgtcgactactccgggcccattttcgatcacgttcccggctcgtacttcgaacccgatacccgcgattcggccggctccgttccgttgtccgtggtggtcgccgacagtccggcccccgagccgattgccgaacggcgtccgcttgaggagtgcgtgatctacgagacgcatgtcaagggactcacccagctgcatcccacggttcccgagcacctgcggggacggttcgctggcgtggcctatccggccgtcaccgagcatctcaagagcctgggtgtcaacgcggtggaattcctgccggtgcaccacttcatctccgagccattcgtcatgggccggggattgtcgaactactggggatacaactcactgggattctttgccccgcacgccgcctactgttcggtcggcaccgagggcgatcaggttgccgagttcaaggaaatggtcaccgcgctgcatcgtgccggtatcgaggtcatcctcgacgtcgtgtacaaccacacctgcgagggcaaccatgagggtcccacattgagcttccgggggatcgatcaccgcggttactaccgcctcaccgatgacctgcgcaatgactacgacatcaccggcaccggaaattcggtcaataccgcacacgcagacgtcctggcgatggtcgtcgattcgatgcgctattgggtgcaggagatgggcgttgacggattccgcttcgatctggccacagagctgatccgtgacggcgaacaccacgtcgaccagaaccatgacttcaagaagctcattgcccaggatccggcattcaagggcgtgaagatgatcgccgagccgtgggacctgggcccctatggctatcaggtcgggaactggggaccggggtggagcgagtggaatgatcgcttccgcggctatatgcgcgactactggcgcggtcaggttgatggcgttgacgagctcgcaacccgcctgagcggctccgccgacctgttcgaccatgatgatcgaccgccttccagctcgatcaacttctttgatgcccatgacggctttccgctgcgcgacctggtcacgtacaacgaaaagcacaatgaggccaacggtgaggacaaccgcgacggctccgacgacaaccgctcgtggaactgtggcgttgagggggaaaccgcagacgaggtgatcaacgccctgcgccatcgtcagatccggaacatggtcgccaccctgatgctttctgacggcgttcccatgtactgcgctggcgacgagatggggcgtacccaacagggcaacaacaacgcatattgccaggacggtccgatcaattggttgcggtgggaccagatggaggaatggggcgacgtgctcgacacggtgcgcaccttcaccgatctgcgcatgtccactcccctgctccacgccaatgactaccgttaccgcaccgaggtcaccgaccccaccggtgccggtctcggtcgctacgagcttgcctggatgaacggctccagtggcgagatgggcgaggccgattggcatgacggctcccgacgcctgctcgggatgtacgtctcggacgcctcctccgtggcatatctcagctggttctactccggcgatcagcccatccaggtgcagatgccacccgcgccctggggagaaagcttccacatcgtggcgtcgacctgcgaagacggtgaggtgcccgatgccgacctggctcccggcgattcgttcacgatgccgccccgaaccgtggtgacaatgcgcgtcgccgtgatgaccacggcgccggttcccgacgatcagccagtcaccgatcaggagatcgccaccggggatccacatatcccggacacaccgcaggctgcggcccccaccagctagtttccccggcccaatccccccgggccgaccccgtgcaagcacttcggacacgtcaaccaccgcgttgtggataactatttttctccggtagaagtttggtgtgactaggcggattgcccgcatgccgagtggcgtgttgctttgtggtggcgttttggggtgttttgcgtgccatgatgttcgcgaactgctcgtcgatcatgggagctcgatgcggatgtccagccgatcaatgcgcgccggggccattgccctggccgctgtgatgatgtcgtcgatggtggcctgtagtggcccctcggcctcggagaaggcctccgcctcgttccacaactcggtgagtgccgcacgggacgccctgttcgaagaggcgaaggccaccaaccagggattcttcgaccttcaggaatcactcggcctgcagggcggggccgaagaactgccggcacagatgcatcgttatgtgatgggcaatgcggccaagtacgttgcggacctgaacgcacagctcaaggaatcaggtgagagaacagagcctgacacccatgcagaaatggtcggtcctgtgctctatgagggtgagaagaagtccggcgcagaagaggccgacagccgtgccgaaatcgtgatcgaacgatgtgtcgatgcccggaagagcccccgactggattcacgaggggagcctattccggggagcacaaacctggtccatcacatcttgtacatggatcacgactcggacggcgaactgaagatcttcgaagcatggtcacaggaggtaacgacatgcccagtaaacgcataacgacctggccgggaatctccgccttgagtgcactcatcgcagggatgcttctagccccgctgcctgtggcggccgatggtgacggcttcgcgttcaatgatcgggccagaaccggggtctctgcttcccgatcgggtaattcgatttcggttgaggcgtgggccggtggcagcaccgcaaccaccaacaccgcaggcaccaccgcaacagaattcgactccaccgcatggacccgctgggccctgtccccctgcagcaccatcatgaaacccgccgccaacaccggagccctgttcacccccgaaaccaagaaacaagccgccaccagccagggcatcgactgcaccacacccaacaccgccaccacgatcgccaccaccgcacaccacgcgatcgccaccatgaccctgcccgacaccaccatcaaactcgaccccgaccccaccaccaaccaatggcacgccgccgcggtgggacaacaactgtggttcaccctcgacaaccccggcccccaacacaccaccaccaccaacacagacatcaccatcaccctgaccgcaacccccggcgccgtcaccatcaacccgggcaccatcaaccccggcgcccacaccacccccatccgctgcaccaccggacgcccacgacccaccaccaccaacggcaaccaaccctcaccagtctgcggcaccagctaccaacaccccggccactacaccatcaccgccacccgcacctggaccatcacctggaccgcccaaggacacaccggcaccgaaaccatcacccgccccgccaccgcacccaccctcgacgtcatcgaactccactccctcctcgtccccaacaactaacccacaccaccaccgcgcaccaccaggaccacccgggacgagaaccccacaccagcgttcgggaaatccggctcttcacgaacgagggtgtagcgcgggtctgaatccgccggcttcgagcagcgaccgagcgatgtagtggctgaggttgcggaagccgagggccgtgccgcggaggtgttcgagtcggccgttgatcgcttcggtggggccgttgctggtgccggggcggtcgaagtagccgagcacgtccgaagcgcgctgtgtgagggtgcgggcgagtttgcggatctcgacgagctgctccgggacgctggcgctgatcttgtcgatcgtgtgcgcgaggaagaatctgcccaggccgcggtccttgtcccggtaggcggtgatcatgtcttggtagatgccccacgtcgcttcgacctcgacgtgcctgtcctcggcgaacagggcatctagccgcgcctgctgcttgtcggtgagcagaccggcaccggtgagcagggtccgtctggcctggtagagcggatcgcccttcatgccccgccggccgaagacgtcgtgctgtacccggcgtcggcagttctccagcgcgtcaccggcgagccggatcacgtggaacggatccatgaccggggccgcgtcgggcagttcttcggcggcggcggtcttgaacccggtgaatccgtccatggcgacgacctcgatcccctctcgccagggcttcggtctggcggcgagccaggtcttgaacacggctttcgagcgtccggcgaccatgtccagcagccgtgccgggccggtcttgtcgcgcaccggggtcaggtcgatgatcacggtcacatacgtgtcgccgtggcgggtgtgtcgccacacgtgctcgtcgacgccgatcgtggtcacgccctcgaaccgcgccgggtcatcgatcagccgccggcggccctcggcgaggatcgcgtcgttcgcggcggaccaggacacccccagccctgccgcgacacgcgtgaccgagagatgatcgaggaccaagcccgccagcccccacgccaacccaccgcgggagatcttcgcccgtaccggcgcggcggccgtggtgtcctgccgccagacccgcccacacccgcagcatttgtagcgccggacccggatcagcagggtcgtgggccgatgcccgaacggctcatgcgcgagccgacggatcaccgtgtcgcgcggggcgccctcgcatccacactcgcggcaccaccggtccggctccacgacacggcactcgatcaccgcccgatccgggtccagacgctgcccgacagcctccaggccgagctcgtcgagaccgcagaacgtggtcaggcaaggtgtagtgaaagtagggtgtgacacgtcgaggtcttccggcagatggcgagtgtgagaacttccatcctcagggagacctcgacccctacccggccaccgacacgctcaacccgctacaccctcgttcgtgaagagccggaaatccccccacaacccccacccgaacccacaacaaaggccgggggccgaccccgcaatgcggaaccggcccccggccttcgttcaatcaatcagtgaatcagcggtcctgtccggcaaccgcagccgtggcgacggtggcaagaccgagctcagcggcatcgtgcagcaaggggtgcttgggcacgacccgcacggtgtatccgatcgaacctgagatggcagagaccaggttggcccggaagagctggccctgttggtccacctgatcggtgggcgccaattcgaagatgcgcacattgtggatctggtcatcggcgtccacgtcgcccgaaacaacctgcacgctgacgtccgtgggctccagcgacccgagcttcacccatgccgagaacacattgcgtgaacccacggccaccgggttgggaagatcgctttccacccggtcgatggccacgccatcccacgcctggcgcacccgctgcttccacgcggccagattggcggccacatcgttgtccagcagcgcgctggccgactgggcagccggtgtgtacaggtcggtgacgtagtcacgcaccatccgggtggcgaggatcttgggacccagtccctccatcgtctcgcgcatcatcgtgatccacccggtcgggagtccattggcgtcgcgggcatagaacttcggcaccacatcgcgctcaatgatctggtagagcgactcggcctccatgcggtccctctcctccggggaggccgcattggtggccgagggaatggcccacccgtacgccgggtcgtaccactcgtcccaccagccgtcgaggatggacaggtttgcggcgccgttgagcgccgccttcatgccggaggtgccacacgcctcctgggggcgcagtggattgttcagccacacatcgcagccggggtacagcgggcgtgccaacgaaatgtcgtagtcaggcaggaacaccagctttccgcggacctcggggtcatcggagaactgcaccatctgctggatgaagcccttgccgatgtcatcggccggatgtgccttgccggcgatgacgatctggaccgggtgctccggatcgttgagcagcttcttgaggcgctcaggctgctggatcatcagcgtcaagcgcttgtaggaggcgccgcggcgtgcaaaaccgatcgtcagcacgtggggattgagtgcattgctgacccactcactgctcatgccccggctcttgcagctgcgcaccaggcgttccctggccatcttgatcatctcgccgcgcatctgtcgcttgagtgaccacaaggtgttgtcgtcgacccggtccagggccgtgaggtccagtccgtcaaccaccgtcccggagtcgccggtctgtgcctgcaggagctccagcaggtcgggatggatccagctctgggcatggacgccgttggtgaccgacccgatcggcacctcgctgacatcgaagtcgggccacaagccctggaacatctcgcggctcaccttgccgtgcaggcgcgacacgccattggcgtgctcacccagacgcagacccatcacggccatgttgaagcggctggggtcaccaccctcatagtcctcagcgcccagtgccaggacgcgatcgatgggcaggggggtgaagtcaccgaactcattggcgacctgctcgttgccgaagcggtcgatgccggcgggcactggggtatgggtggtgaagacgttcccggcgcgggtcttctcccacgcggtatcaaagtcatcacccgaagtcatgtactcgcggatccgctcgagcccgaggaaaccggcgtggccctcgttgcagtggtacacatcgggatcgggacggcccgtgacgcggcagaacgcacgaagggcccgcacgccgcccaccccgagcaggatctcctgggcgaggcgatggtcggcactgccgccgtagaggcgatccgtgatcgaccgtgcggcctcgtcattggcatccacattggtgtccatgaacaacagtgggacgcgtccgacctgggccacccacagctgggcaacgacgggtcggtggttgatggtgagcgtgatcgtgacgggctcgccgtcctcgcgcagcatctcaacgggcagctcattggggtcaagcaccgggtagtgctcctgctgccagccggccgcgttgagggactggcggaagtagccgtgggtatagagcaggccgacgccgatgatcggcaccccgaggtcggatgccgacttcaggtggtcaccggccagtacgccgagtccgccggagtactggggcagcacggaactgacaccgaactccgccgagaaatagccgatcgccttgggggcctccgggtggcgggagacgaatccctggtaccaccgatcccccgagacgtaatcagacaggtcggcggcggcaagttccaggtggcgcagataacggcggtcgccagccagtgtgtccaggcgctcgcgtgaagcgcgggacagcagcttctgggggtcatgggatgtctcttcccacaggaccggatcgatggcctcgaacaggtcctgggtgtcctgatgccatgaccagcgcaaattgcgcgccaggacggccaagggcttgagggactcgggtaggaccggctgaacaatgaatcgtcgaatagctcgcacgtccacaaggctaatgggcacgcaagccgcgcgccgattcgcgcgaagatggacaggacccaccgcacgctgcgggccagcaataatggccacgccattcgcgcctgtcagccccagttcgagtccgccttggatagcgtgggggcgtggtctccaagaagaagcgtcagcgcagtgcccaggcacgcgtccgttcacgggtcacggtgcaggcgagcgctgaccccaagcccaccgacgcccaggcccggcccaccgaggtgccaccccagccagcggccttgagcgtgcctccccccattccccccggattcggcaggatcccggtacacaatgtgcaaccggtccttgaagggggcgactacgcggcgaaggccgtggagaacggtgacctcccggtgaccgcgaacatcttccgcgagggtcacgacgccgtggcggcagcagtggtcctcaccgaccccgccggagccacccagcgctttgagatggcccagatcgagcccatcggcctcgacatctggaaggcatggatcagggtggggcgtccgggcgactacagcttccacatcgaggcctacgacgaccgctggggtacgtggcggcacaacgcggggatcaagttctcggtcgggcaggacattgcactggtctgccttgagggcctccaattgcttgatgaggcgcgtgacgccgcacgggccgccggcgacgatgcagcggtcaccctgctcgagcaggcagcctcccagctggaccccgaacagcccatgacggtgctcgcatcattgccgacccgcgaggacctgcaccaggcgatggtgcggtggtgcccgcgcaggttggccacccccacccgcgaattcccgctcgtcgtgcaccgcaaggcggcacagttctccgcctggtatgagttcttcccccgctccatcggcgccgagcgccatgaggacggctcgtggacctcgggcactcttgcctccagcgaggaaatgctcgagcacgtcgccgcgatgggcttcgacgtcgcatacatcccaccaatccatccgatcggccacagcttccgcaagggacccaacaattccctgaccgccggccccaatgaccccggatccccatgggcgatcggttccgccgacggcggccacgacgccgtgcatcctgacttgggcacgctggaggactttgaccacttcgtggccagggcccgcgagctcggactcgaggttgccctggacttcgcgctgcaggcagcgcctgaccatccatgggccacgcagcacccggagtggttcaccacccggcccgacgggtcgatcgcgtacgcggagaatcccccgaagaaataccaggacatctacccgctgaacttcgacaatgacccggccggcatctacgcagaggtcctgcgcctcatggaattctggatcgggcacggggtgacgatcttccgcgtcgacaatccgcacaccaagccggtcagcttctgggcctggctcgcagcagagttgcacagccgccaccccgaggtgctcctccaggccgaggccttcacgcgccccgagatgatgcacgccctggccaaggtgggattccacctgtcatattgctatttcgtctggcgcaccaccaagcaggaactatccgactatctcaatgagttggcccacgagaccgagtcgttcttccggccgaacttcttcaccaacacacccgacatcaatccgaagttcaccaggtcgggaaacccggccgcatttgccatcagaatgattcttgccgccaccatgtccccggcatggggtgtgtattccggattcgagttgttcgagcacgccgcgctggtggacggtggcgaagaatacctcgactcagaaaaatatgagtaccggccgcgggacttcaccgcggaaccgaacctcaaccagttgatgacgaagctcaaccgcgtacgccacgaccatccggcattgcagcagctcaatcacaccaccgtgctggaaaccagttccgatcagctcttcgccttcgccaagcgcagcggcgacgaccgggtgatcgtcgtggtgaacctggacccggacaacacggtggaaggcacggtgtacaccgacctcggcgccctggggttgcccgccgatgcccgcctggtggcacacgacgagctgaccgatacggtgttcgattggaatgccgcccactacgtgcggctctggccggcacagccggcgcatatcctgacaatcagctgggcctagtcatgcaccttcgtgtcgtgatgactcccacctcccgcaccctgaccgatggaagccgatctgccccgtgacatctgaccagaacatgacgtctgaccagcactccgagaccccgcccatccgggccctgctcggcgaggacgaggaacgcaccgccgacgccagggccaaactggagatggcgctgagcctcacccagcccaccggcgcggtggacccgcacgacaccagttggttcgagaccgccgtgttctacgaggtgatggtgcgctcattcgccgactcatcgggcgatggcatcggtgacctggccggacttaccgagcacctggactatctgcagtggttgggcgtcgattgcctgtggctgccaccgttcttcgcctcaccgatgaccgacggtggctatgacgtcgccgactaccgcgcgatctcccccgacctgggcacactgtccgaattcggcgacttcattgacaaggcccatgatcgcggcatccggatcatcattgacttcgtgatgaaccacacctcggaccaccatccgtggttcgaggagtcacgccgacacccggacggcccctacggcgatttctacgtgtggcgcgacaacccggatggatatcccgacgcccgcatcatcttcattgacacggagacatcgaattggacctttgatccggtgcgcggccaatatttctggcaccggttctattcccaccaacccgacctcaactacgagaaccccaaggtgctcgccgagatgctcgacgcgctcaggttctggctgggcttcggggtggacggattccgtctcgacgccgtgccctacctcgtcgaggaggaggggaccaattgcgagaacctgcccggcacccacgacatcctcaagcaggtgcgcaagatggtcgatgaggaattccccggtcgcatcctgttgtgcgaggccaaccagtggccccacgacgtggtggagtacttcggcgacaacgacgagtgccagatggccttccacttcccggtgatgccccggctctacatgggcgtggcccggcacacgcgcgaggcgatcacgacgatcctggcctcaactcccccggtaccccaggggtgccagtgggcgacgttcctgcgcaaccacgacgaactcaccctcgagatggtcaccgaggatgaccgtcaatacatgtggcgtgagtatgcgccggacccccggatgcgcctcaacctgggaattcggcgccgcctggcgccgctgatgggcaacgatcccgacaagatccggctcatgaatgccatgttgctctcgctgcccggttccccggtgctctattacggcgacgagatcggcatgggggacgacatctggctccacgaccgcgatggcgtgcgcacgcccatgcaatggaccgccgatccctcagccggtttctccacggcaacgccggacaagttcttcctgccactgctggccgacccctacagtccccagcaggtcaatgtcaccgatcagatggctgatcccggatccctgctggtgtggatgcgttccatgctcaccacccgacgccagttcccggtgtttgggcgcggtgagttcatcgacatgggtggccagaacgatgcggtactcagcttcctgcgggtgctcgacgatgacaagcacggctcacaacgcctgctgtgcctcaacaacctgtcgcccgaggaacaggacgtcctgctctaccttcccgatgatgccggcacgaaaccggtgtcgctgctcacgtcgcaggccatggcacccatcgcggccaacggtgagtttcacgacaccctccccgcttggggctttgcatggttggatttgagcaaaggctcggacgagcacgagtccgagtgaacaggaggcccactgatggtcgcgccgaacgatgatccgcggtggcgctacgcatcgaccgcacgctggttcgccggcaaggggcgcggaggtgtggcacgacgcattgaggccctggactggtaccgcgcccccgaaccgggacacctgggcgtgcgcagcgagatcatcacgattgcctaccccgatggcgcccacgactactaccacctgccgatcagctaccgcacggcgccactttccgacgccctgatcgggcccgccgacgacccccagctgggctatgcgcatgacgccaccacggaccctgaggccatggagctgctcatcgcctcactcggcaggcgcgtcaacagtggggactggtcggcgatgctgccccggggcgatcgcctcaccggttcgatgccggcacgtccgttcaccggcgagcagtcgaattcgacggtcttcctgggcagcaccgcgctggtgaagttcttccgtcacctcgaggtcgggaacaacgtcgacatcccattgcacgaggccctgggccgttaccgggtacgtgacgtcgacgagctctacggctgggtcaccgcacatttccgggcgatctccgggcgcgcggtgcatgccgacctgctcatgatcaccgaacagctcaagacccttggcgagggatggccgatggcggtggagtccgccaccgccgacaccgatttctcggcacatgcggccgggatcggccgcgcgctggcgcatgtgcacctggcgctggtgcaggcatttccgcccgtgatgctcaagggcgacgatgtggctgacggcatggtggccaggctcgacagggcgatagaggccgtgccggcgctgtcggactaccggtccatgctggtggtcggcttcaaccgcttgcggggccatcgcctgccggcccaacgcgtgcacggtgacttccatctgggccagacgcttctcaccccgggcggttggcgcatcatcgacttcgagggcgagcccctgcgacccctggccgacaggacgctgcccgactcggtgtggcgcgatgtcgccggcatggtgcgctccctgggctacgcggcggcacaggacggctcccccgacgcccccgcgcgccagcactggttgcaacgcagccaggccgcattcatcgccgcctacctggagatcaccggggtgcatgaccaggttgacctgctggatgcctatgtggcggacaaggccatctacgaggtggtctacgagacgcgcaacaggcccgattgggtccatatcccgatggccgccatcacgtcatggcacgagcaccaattccaagcccccaggggaaggacacatcatgcatgacaagttcgggaacctcaccggcacggacctggagggcttccacagtggtggtgacaccgaggcctggcggcgattgggttcccacgtcgtcaccgtgcatgacgacgcgcgcggtgacctcagcggcaccaggttcgccgtctgggcacccaacgcccagcgggtgcaggtgatcggcgacttcaactggtggcagggcgacgacatggagttcgtgccgggctcgggcgtctgggggctgtggaaggagggcgtgggtgccggcgcccgctacaagtacaagatccagcaccgcgacggcagctggcaggagaaggccgatcccttcgccttcagcaccgaggtgcctccggccaacgcgtcggtcgtcttcgagcgggagcacgcatgggcgccgagcgaggaatcctggctggcgcatcgggcgcaggccgacccgtaccactcgcagatgagcatctacgagctccacgtgggcagctggcgcaagggcctcgactaccgtcagctcgcccaggagctgcccgcctacctcacctggatgggttacacccatgtggagctcatgcccatcatggcccacccgctcgaggcgagctggggctatcaggtcaccggctactacgcggtggacccgcgtcatggcagcccggacgacctgcgcgtactcatcgaggccctccacgcagccgggatcggcgtcatcctcgactgggtcccgggacatttccccaaggacgactgggccctgggccgcttcgatggcacggcgctgttcgaacatgccgatccccgtcagggcgagcaactcgactggggcacctatgtgttcaacttcgggcgcaacgaggtcaagagcttcctcatctcgaatgcactgttctgggtgagcgagttccacatcgatgccctgcgggtggacgccgtggcgtccatgctctatctcgactactccaggccgccgggcgggtgggtgcccaacaagtacggcggccgcgagaatctcgaggcgattgacctgttgcgctacatcaacaggcatctctaccggcgccagccgggtgtcatgatgatcgccgaggagtccacgagcttccccaaggtgagcgcaccggtggacgtggggggcctgggcttcggcttcaaatggaacatgggctggatgaacgactcgctggagtacatcaagctcgaccccatctaccggcagtaccaccacaacgagatgaccttcgccatggtctatgcctactcggagaactacatcctgccgatcagccacgacgaggtggtgcatggcaagggatccatggtcaacaagatcccccaggacgactggcgcaagtttgcgaccctgcgcagcttctactcgttcatgtgggccttcccgggcaagcagctcctgttcatgggccaggagttcggccaacgctcggagtggaatgaggcggtgggcctggagtggtgggtcgactccctgcagtggcacaagggcctgcgcgacatgatgcgcgagatcaaccatgtgcaggcccggacaccggcactgtatgaactggacagcgagccggagggcttccgctggatcaacgacaacgactggatggccaataccttcagctggctgcgcttcgatcgtcagggcggcatggtggcgtgcgtggcgaacttctcgccggagccctaccccgaatatggcctgcgcgtgcccagggccgggcgctggcgcgagatcctcaacaccgacgaacaacgttgggatggcagcggcgaggcggcgaacggcacccgtatcgcacaacccgtggacggcgaggagggggccgaactggtcatctcgatcccgcccatggctggcgtgtggctacgcttcgaaccggaggccaccgactcatagggatggcgggcgagtgcggatgatcagggagtgccgtggatgacttcaaggtgaatgtggttgtcgatgccggcatcggaaccctgcactggcagggaaccgttgaccagaagacgctcgatgaggcagtcagcctcgctgcggacgacgccctgatcggccacgaactgcaccgggtcgaggcgagtatcaccgccgatgacctgatggcgatgcgggcgctgcatcgcgccggtttccgccgcgagggacgtcgtcgccaggcggtacgtgccgacgacggcagttggcacgacgccctgttgtacgcccgactcattgacgaccaggtctacggtgccggtgggttcaccgcggtgatggataccgtcatggccacccaccggctgatcggccacgtgctcatccgtgatgagcgcgggcgcgtgctgttcgtcgagaccacctacaaggaggactgggagttgcccggcggcatcgtcgaggcgggcgaatccccccgggtcggcgccgaacgcgagctgcgcgaggaactgggcgtcgacatccggctcaaccagcccctggtcgccgattggatgccgccctacctgggctggcgcgacgccatggagttcatcttcgacggaggccaactgccgtcgagcaccgtgcaacgcttcgaacgtcccgcccaggagatccgcagctaccactgggtggcgcccgaggagatcgccgaacacgtcacgccactgtccgcccgccggctcgcgctgctcgtcgccggcatcgcacctgcctataccgaggcgggcagcccggtcacgcccgacgcctagcgccgcgcgggcccgtggcccgacccgctccccggcacatgcacaagggctgtgtcccaccggttctggtgggacacagcccttgtgcatgttgggcgggactcagcggcgggctcagcccttgagggcgtccgagaccacctcgcgggcaccgtcctggagctcgccgaggtgctgggcactgcggtagctctcggcgtagatcttgtacttgtcctcggtgcccgagggacgtgcggcgaaccatcccgcctcggtggtcaccttgaccccgccgatcggggcgtcattacccggcgcattcgtgtagatgtgcgtgatcgggtcgcccgccagcacggtcgccgtcacatccgagggcgacaatgccttgagcctggccttctgggcccgatccgcctcggaatcgatgcgtgcgtagtagtaggtgccgaacctggcctcgagttcgcgatagtgctcgctcggcgtcttcgcggtcctggcagtgatctcggcggccagcaggtccatgatgaggccgtccttgtcggtcgtccaggtcttgccacccagctcgaggaaggacgcaccggccgattcctcaccaccgaacccgagctcgccactgatcagcccggggacgaaccacttgaatccgacgggcgtctcgtacagggagcgccccaacagcccggccacgttgtcgatcatggtgctcgacaccagcgtcttgccgactgcagtgttggacgcccaccggggacgattgccgaacaggtactggatcgccacggccaggtaatggttggggttcatcagtcccccgtcgggtgtgacgatgccatgccgatcggaatcggcatcattgccggtggcgatgtcgtactggtcgcgcttggccaccagggaggccatcgcatcgggcgaggagcaatccatcctgatctggccatcggtatcgagcgtcatgaaataccacgtcgggtcaatgaccttgttgaccacgctgaggttcggcagcatgtgctcgccgatgtattcccagtactgttcggaagccccgcccagcgggtctgcaccgatatgcagtcccgaggccttgatggcctcgatgtcgaccacattgcgcaggtcctcgcagtagcgactgcggtagtcgaagtgctccacctggcccttggcgcgctcatagggaatgcgcttgatcccctcgaggttgccgagcagctcattggcgcgtccggcaatccaacccgtggcatcggtgtcggccggtccaccgttcgtcgggttgtacttgaatccgccgtccctgggcggattgtgcgacggcgtcacgacgatgccgtcggccagatcgcgttcgcgtccgcggttgtgcaggatcaccgcgcgcgacaacgccggtgtcggggtgtattcgtcctcggcctctgcgagcacgtggacgccagccgcgacgagcacctcgatggccgtcttccatgccgggagcgacaggccgtgggggtccttggccaggtagagggggccggtggtcccctgtgacgcccggtattcgacgatcgccgcggtaatggcggcgatatgggcttcgttgaatgccgtgtcgaatgctgatccgcggtggcccgatgtgccgaagacgacctgttggtcggggttcgtgggatcggggcgcttgtcgtaataggcggcgatgagcgcatcgacgtcgatgagatcggagggctgagccggctgtccggcgcgtggatctgccatgtctccatcatggcgcagccggtggcgcaatgggcgtcatggtggtgatcggttcctgtgagcagcccgggctcccgtgccccgcatcgccccgatcgctccccgggccgggggtggaagaatagggagacatgagccaacctctcacgcctcgtcaaccgtccggtccgcagggtcccgcccgcggtcagtcgtccgctgccccgcagggccatgccccctcggcacattccgacttctcccgacccggcgccatcgacctgtccaagatcgccgccacctcccccgctgccccgcagcccggtcaggccggcgcgtccacgggcagctacgtcgtcgacgtcacggaggccgaactcaatgacgtgatccagcaatcggtcaactatccggtgatcctggcgctgttgtcggccaatgacccgggcagcaaccagctgcgctccatgctcaccaggctggccgacgagtccgccggccgctggctgctcgccgtggtcgatatcgacacccagccgcgcatcgcgcaggcgctccaggtgacggccatccccactgtgctcgccctgctggccggtcaggcgatcccgctgttccagggcaccgccgacgaggcccaggtgcgcggcgtgctcgagcaggtcatggcctccgccgtggcaaatggcgtggcaggccatgtcaagcccgtctcccacggggaggccggccccgatccgcgcttcgccgcagccgacacggcgatggaggccgaggactacgaccgggcggccgacgagttcggcaagcttctggcggccaatcccaaggacagcgaggccgctgccgggcaggccaccgcacggctgatgtcgcgcgccgcgaatgccgatccggaagcgacgcttgccgccgccaaggcggcacccgacgacgtaccggcggcgatggccgcctccgacgtcgacatgattgccgggcgtcccaaggacgccttcggccgcctgatcggcctcatccgcaccactgccggcgacgagcgcgacgcagtccgcacgcggctcctggagctgttcgagaccatggaccaggccgatcccgaactgctggccgcacgtcgcgccctcggggcggccctgtactaggcccccgctcccggccgagcgccttttcggcacttctcaccgcggccctttctccagggcccggatttgagaccgcgcggcgtgtggttcctccgttcccgacgaccaccggaccggaggaacccccgccgcggtgccggcggcaatatccgcgcggtaacaccgacccgggacggatggatgcgaataccatctggtcacatcgcggcggcattgtgggatgatggccccatgagtaatgaggatcttttcatctgtatcgatcacgtggcatatgcgtgccccgacgccgacgaggcttccaagtactaccaggagaccttcggctggcatgagctccaccgcgaggagaacccggagcagggagtcgtcgagatcatgatggccccggctgcgaagctgaccgagcacatgacccaggttcaggtcatggccccgctcaacgacgagtcgaccgttgccaagtggcttgccaagcacaatggtcgcgccggactgcaccacatggcatggcgtgtcgatgacatcgacgccgtcagcgccaccctgcgcgagcgcggcgtgcagctgctgtatgacgagcccaagctcggcaccggcggcaaccgcatcaacttcatgcatcccaagtcgggcaagggcgtgctcatcgagctcacccagtacccgaagaactgactgcgagtagtcgattagtcgcccgcgggtcctgatcaccaccgacccggcgacatctgcctgtggcgcatccatcgtcggatgcgccacagctgcgttcacgaccactttcaccccaccgccacccaccagcttccgagaagggaacgccgcccatgatgcgagtgcgccaggccatcgccaggatcgggtgggcgatcagtccctaccagctggtcggccgggaactgaccagcgagccgggcgtggtcctgggcgcgccccacaccagtaactgggatttcatcgccttcctgggcgtgtcctggtattaccgggtgccgctcaaggtgctggtgaagaagtcgtggatgcgggggcccctgtgggccctcggaaaggccctcggcgccgtggcggtggatcgcgcccatcccggacaggtggtggaccacctggtggcgcaggcagagcagggacactccttcaagctcgtcatcgcccccaaggggacccgatcacctcgccagtactggaagtccggcttctaccggatcgcactgggtgccgggctgccggtgacgctggcgggcatcgatgccggtcgccgacaggtcgaggtcggacccacgatccgcctgaccggcgatgtccatgccgacatggatcgcatccgtgccttctacgaccgcttcgatggcgtccacccgcaactgcgctccgacccgcggctgcgcgaggaggactcctgaccgggccgtcgcgcggtcacggcgacatccagatccccatccacccgacaagtacacctgcctgagcctggtcggatgcccccacgtccgggcggttcacaagttcaatcccgcccggaattggtagcctcgatccagacctgcccgaggagccttcgatgagccaatacgacgacagccacaccggtgatgaccagagcgaggagaccggcctcaacctcttcgacgaccgggccagcgcggccgggaacttcccccacgcgatgatgggatacgaccggagcacggtcgacaactacgtacgtgacctggagcagcgtctctcggcagcccgccagctcaatcgcgatcggctgcgcgacctcgagtcattgaagtccgagcaggggacgaccgacttcacccggttgggcgcacatgccaccaacctgctgcgcgccgctgaggcccaggccgacgacctggtgaccaaggccggggtcgaggccgagcgcatcaaggaggagggccgccgtgttgcggccgacctgcgcgccaatgcccagaccgaagccgatgatgtgcgtgtctccgggctgacgaacctgcgcaacctgcgcaaggagaccgagcaacagacgcaatcggtcatcgcgcacgcgaaggaacaggccgccaccgtggtggcctcggccgagcagcaggcgcaggccgtgatccaggaggctgagcagcaggccgagatctcggcacacaaggccgacgacgccgcgaaggcctcggagcagcagaaccagcagaaggcggcccagaccgcactggaggcaaagaaccgggcccaggagatcgaggcccaggcccacatccaggcagagcagatccttgccggtgcacgtcgtgacggggaggccacgaaggccaaggcccagcaggcgctcaccgacgcccacgcgcaggccgaccaggtgctggccgacgccaggcgcgaggccgatgccaccagggcaaaggcggaggccgccctggccgacgcgcacgcaaaggccgacgagatcctggccgatgcccgcaacgaggcacaggcgacgaaggcgaacgccgaatcgaccctggctgacgcgcacaccaagggcgaggagatcctggccgatacgcgccgcgaggccgatgccaccaaggcctccgcccaatcccaggccagcgagctggtggacaagggcaagcaggaggccgcggacgtgcgagcccagggacaggcccaggccaagcagatccttgaccaggcccgcgctcaggccgatcagatccaggccgacgcacacgacgcagcccagaaggcgttggacgccgcatccgcccaggcggacaaggtgcgcaaggacatcgatgcgctcctggcgcagagcaccaagacggcccaggaatcggccgcccgggtgaaggcccaggccgatcaggtggccgagttgagcgccaaggcgctggctgcggccgagcagagcaagaccgacggcgtgcgcgaggcggaatcgcaggtggcggccgcccatcgccagtccgcgatgatgaaggatcgcctcgaggagcagtacgcctggcgcaaggaacagctcgaacgcgagacacacgccctggagctgcgcaaggatgccgtgctggcccagttgtcgaatgtgcgggcgcttgcccaggaatccgtggccgacttccccaacaccgactcgctgaccaacgccgccctgtcgctggctgatggcacctccaccgggcccgacgccaccatggccctgaaggcgaccgtgggccccgagggacagcagtcaggggggcacgaggacgatcagcagtggctggcacactcgggcgacaatggggcgacgaatgcctcacccgacgaggaaaccaccatgctgaagaccaaggacccccagggggaaccgcgcagctcgcggcggaacaagaagtcccgctgaccgtgccgggtcggcggccagaaccgccggccccgtcggctcagaacaggcgttcctccgcgttgtcgatgccccgcagtgcgtcatagtcgactgtcacgcagtcgatgtggcgcgtgcttgccagcacctttgcctgcggcttgatgagttgtgcggcgaagacaccccgcaccggtgccagcaggggatcggcattcatcagctcgaggtaccgggtgagctgttccaccccgtcgatctcgccgcgtcgcttcacctcaaccgccacgtatcccccgtcgtcactgcgcaacaggagatcgaccggaccgatggcggtggggaattcccggcgcaccaatcgatagcccttgccgaaggtctgtgggttctccgccagcagtgcctgcaggtgggcctcgacaccgtccttctgcagtcccggatcgatgcccagatcgtattcatgatcgtcgatgatctcggcgatggcgatctgcaggatgtcaccgttgcgggccttgaccatccacacctggtcgatctcggcatcgaggtcggccgttgtggccgcaaggtcctgcggcgcatccaggacggtgagcgtgcagggcggactcatccagttcaggggcttgtaggcgcggtcatcactgtgcacggcaactgagccgtcggacttgatgatgatgagccgcttcgccatgggtaggtgggcagtcaatcttccgccgtagtcgacctggcagcgggctataacaacgcgcacggcgtacacggtagcagggcgttccagccgatcgccgggccgagcgaggccgctgccgccacctgttcggacgggccgattagtcttggacgcatgggtcaccaccgtccgagcaagcatcttcgcgccgcgcgcccgttgaacgtcggcgccatgcgcacggccgtgcagaagtacgacggacgctggatcgtgcagcagatcgtggcaggacgctccgtcaaggagtaccgctgtccggaatgcaaccgcatgatcccggcgggcaccgcgcacgtggtcgcgtggctcgaaacgcccccgatcggcgcaacctcgccggttgagttccgtcatcactttcacacctcctgctggaataggcggccatgaaccagtcatccgggtcccttcacgtcacgacgatcggctccgggccggccactgcggtgttcctgcacggcctgctcggccagggcaagaacctggcgggtgcggccaaggcccttgatggcgtggcgaccagcctgctcatcgatgccccgaaccacgggctgtcaccctggaccggggaattcgactaccgggccatgggcgacgccgtggccgccgaactcgaacaacgcggcgccgccggcaaaccagtggtcctcatcgggcactcgatgggtggcaagaccgcgatgtgcctcaccctggaccacccggagctcgtcgagaagctgtgcgtcgtggacattgcgccggtgacgtacagccactcaaagttcttcaccgacctcatctccgccatgcgcggccttgaccttgccgccctgggatcacggcgtcaggctgaccagtccctggccccgcagatccccgacccggtcattcgtggcttcgtgctgcagaaccttcaccacgggccgtccacgccggcgcccggggaccgcggacccgagacctggcattggcgcgccaacctggcgcttctggcccgggcgctgccccagatggaggccttccccgacttcgccgggcgccactgggacggacccaccctgtgggtctcgggtggcaggtcggactatgtgcaacccgcctaccatgcggccatgcgggcgctgttcccccgggttgagctggtgaccgtgcccggcgccgcccactgggtgcacgccgacgagcccgccgagttcgggcagctgctccgcaacttcgtcacgcacggtgagtgagcgccacgctctgcgccgcggacaaattccccgctgctgcccgccgctattgcgcaactgccgattagggtgagagacatggtaaacatcacgcgcgtctacacccgcaccggcgatgccggcaccacccgcctgtccaacaacgaagttgctcccaagaccgatccccgtgtgcaggcatacgggcaggtggacgagaccaactgcacgatcggggtggccctgacgctcgaccccagcgacgacatgcagaaggtgctcgcgatcgtgcagaatgagctgttcgacgtcggcgccgacctgtcgagtcccgtggtggccgatcccaagttcaggccggtacgcgtggatcagacctcggtggatcgcctggagaagtggatcgacgagttcggtgaggacctgccggcactgcgctcgttcatcctgcccgggggaagtccgctggccgcacagctccacgtggcccgatcaacctgccgccgtgccgagcgggccgcctgggaggccgtcgaggccttcggcggcgaggacggaagctccgagcccaagggtggggtgagcctgatcgcggtgaagtacctcaaccggctctcggacctgctgttcaatctgtcgcgccatgccaactacgaggcggaacacgacgaggtgctctgggtgcccgacggcgagcgtgaggtctgagcgaggcgtggtgccgcgcactgccgaacccgcgtgacccggaggccccggccgccacttgcaccccccaacggcctgcccacaacccagcaccaacaggtggcgggcaggatcggcaggtgggcggcgtcagcaggtggcgggcaggacgcccgccgggaatggttcgggctcagggaacccgataggtccactcaggggtgttgaacttggtgtcgaccagctgttgggcccgagccatctcctcgggcgtgtaatcggaatcgaagcagttgtagcgattcttgaagtacgccaggaacctggtgaagatctcgtcgcggggcagcccggtctgtgagcgcatcgggtcgacgcgcttgttggcgctctttgtccccttgtcggacagcttctcccgcccgatgcgcagcacctccatcatcttgtcggcgtcgatgtcgtagctcatcgtcacatggtggagcaccgtgccatcgaccagccggcgctgggcggcgcctccgatcttccccttgtcgctggcgatgtcgttgagcggcttgtaggtggcgttcacacccacctctgccagcgcaccgagcacccagtcatccaagtaggcgtaggactgttcgtagctgagtccctcgacgagggatccggggacgaccatcgagtaggtgatgcagttgccctgctccatgaacatcgccccgccgccggtgatgcgacgcaccaccttgatgccgtacttgcgcgcgttggcctcatccacctcattgcgcaccgactggaacgagccgatgaccaccaggggccggtcccagtcccagaagcggaagaccggtccgcgcacgccctgcgacacctcatcggggattacctggtccagggccacgtgcagcgtcggatccatcaccatgggtcccatgacctcgaaggtcaggtcgttccatccgagcgcgccgcgcactgcccgacgaaccgcgatacccactgcctccggatcgaagccgatcagtcgcgcgtcgggcgacagccgcgcccggattgccgcggcgaggtcagccacgctggcgttggccggctggccttccaacgccgcattgatctcgtccaaggcatcatccggttccaggaagaagtcccccgatacgtgcacgcgtgcgagccgcccgtccacgatctccagatcgacggccaccagttttcctccacgcaccttgtactcgccgcgcaacgctgcctcggccatggtgtctccccctgtcagctgacctagtcgaattcgcgatagctttcgccaccgggggggcccgcttcgagccacgccatgaggcccatgagcgactccggcgcgagacccaactccatcacatgctccgccccacctggagtgtgcacctcaaggcggacgatccggtggctgttcactgccagcagaccgtcctgggggctcggtgcccgatggtccatgaggcgggccccgcggcggcgaatcaccaaggtgggtcggaagctcgccgacagcatcttgtaccacagcaacgaattgcccgagtagcgggccacaccgggaacccaccgcgaaccattcctcggcaggcgctggcgcacctcgcagctgaagatcccctcacggctcaggagccactgccgcctggcaatgagcacgccgaggccggccacgacggccagcgccagcaccacagccacgatctcgagcgcggcgatcatgaagcgatcgccctgtgctcgttatccatcgtcgcggacccctagtcccccggcgcgatctttgcgggctgcggggtgatctccgagtagctctggcccttcatcttcgcctggtactggccggcggcccgcagctgtgccaacgcacggttgtattcgcgggcctcgtcggtggtggcctccgagctgtcgatgcgctcatgcaggttcgcgaccgtcacccgcgcctgttccacggagatctcctgcgcgagctcggcaaacgaactcaggagcgacacgcgattacggaagaccgagatgaacccgtcggacaccgcgatgatctcgtcgatgccctccggggtggtcacctgcacggcgctgggaaccagcgccgccatgaacggctcgtggtcggcgaggataccgatatcgccttcggtcgtacgggcgatgagcgagacggcctggccctcccagaccttgccctccgcagccaccacctcgacctggagaagattcggcatcagccctccttcttcagctggtcccacttcttgttgacatcatccatgtcaccgacgttgaagaaggcctgctcgggaatctcgtcgcacttgccctcggcgatcatcttgaagctctcgacggtctgcgccaccggcacggtggagccctccacgccggtgaacttcgtggccatgtaggtgttctgcgacaggaactgctggatgcgacgggcacgtccaacgacgatcttgtcctcctccgacagctcgtcgatgccgaggatggcgatgatgtcctgcaactccttgttccgctgcaggatctgcttcacctcggtggccacgtcgtagtgttccttgccgacgtactcgggggccaggatgcggctcgtcgagctcagcggatccacggccgggtacaggcctcgcgaggcaatgtcgcggctgagctccgtcgtggcgtccaggtgggcgaaggtcgttgccggagccgggtcggtgtagtcatcggccggcacgtagatggcctgcatcgaggtgatcgaatgacctcgcgtcgaggtgatccgctcctggagctggcccatctcgtcggccaggttcggctggtagcccaccgccgagggcatccggcccagcagcgtcgacacctcagaacctgcctgggtgaaccggaagatgttgtcgatgaacaacaacacgtcctggttctcgacgtcgcggaagtactccgccatcgtcagggccgacagtgccacgcgcaggcgcgttcccggcggctcgtccatctggccgaagaccagtgcggtgtccttcagcacattggcctcctccatctcatggatgaggtcattgccctcgcgggtgcgctcccccacgccggcgaacaccgaggtgccaccgaagttgtgggcaatgcggtagatcatctcctggatcagcacggtcttgccgacgccggcgccgccgaacaggccgatctttccgccctgtacgtagggggtcagcaggtccagcaccttgatgcccgtctcgagcatctgggattcgggttccagggcgtcgaacgccggcggctcgcggtggatcgaccaccgctcgtcgatcttcaccgtggcggggtcggcgttgagcaggtcgccggtcgcgttccagacgtgacccttggtcacatcgcccaccgggaccttgatcggtgcaccggtgtcgaccacctcggtgccacggcgcaggccgtcggtcggcttcagcgagatgcatcgcaccgtgttgtcgccgacctggagggcgacctccatggtgatggtcgttgaaccatcgccgctgtcgagcgagacgtgcagggcattgtcgatctcgggaaggcgacccgaggggaactcgacgtcgaccaccgaaccaatcacgcggacgacatgaccggtgccggccgtcccggcgtcctcgggagctgtctgtgtggcagtcattcacatctcctgtgttgattcggacaacgcgctcgcgccgcccacgatttcggtgatttcctgggtgatctcggcctggcgcgcggtattggcctgacgcgtcagggtgtcgatcagttgctgggcattgtcagtagccgagtgcatggcctgctggcgggccgccagctcggacgccgccgactcacgcagcatgtacttgatccgatcgatcacgtacagcggcaggagtgcgtccaggaccgtctcggcatcgggctcgaagttgtagggcggtgcgatctccgcattgtcgctcacgacgtcgtcgccggcgtgggccgtctcctcctggtcgcgcacgacctgcaggggaaggagccgcaccaattcggtgcgctgggagaccagggacaggaaccgcgtgtacaccacgtggatctcatcgactccgccggcctcggtgtccttcatgatctgatcgatcagcacccgcccgatgtcatgggcattggcgtagtgcggatcctcggagaacccctgccacgactgcttgatcggcacatggcggaagttgaagtaatccagggcacggcgcccgaccgtgtagatgtcggtctccagcccaccctcggccaggtgcttgagcagtccctcggaggccctcatcacattggcgggataaccgccggccagaccacggtcggagttgatcaccagcaccgcggcgcgcttgggatgctccttgatctgggtcagccggtggtcctcgcgcgtgtaggccgccacggttgacaccgcacgcacgagttcacgggtgtattcgtcggcgttgcgggcccgctgctgggccttggtgacgcgcgaggcggcgatgagctccatggccttggtgatcttcatcgtcgtggcaacggaatttctccgttgcttcagctcacgcagggatgtcgccatggtcaggacctcttcgtggccacgatcttggcctggttgatgtcctcattgccgaccttctccgaatccctggcaccggccagcaattggccgtcgctggtgcggaaggtctgcttgaacgaggcgatcctgtcatcgagggaggccacggtctcgtcgctcagcgcaccgctggatgcgatggtggtgagcaggtcggtgctctcgcgcaggaagtccaggaactcggactcgaagcgcagcacatcgtccacgggcacgtcgtccagcttgccgttgacgccggcccagatcgagacggcctgctcctccatgcgcagcggctgggcctgctgctggcgcagcagctctgtgaggcgtgcgccccggtcgagctggcggcgactggtcgcgtcgaggtccgaggcgaacatggcgaaggcctgcatgtcgcggtactgggccaggtcgatcttgagcgttcccgagaccttcttcatggccttggtctgggcagcgccgccgacgcggctcaccgagttgccgacgtcgacagccggccgctggttggcgttgaacagatcggagagcaggaagatctgaccgtcggtgatcgagatcacgttcgtcgggatgtaggccgagatgtcgttggccttcgtctcgacgatcggcaatccggtcatggatcccgcaccgagctcgtccgacagcttcgcgcaacgttccagcaggcgggagtgcaggtagaacacatcgccggggtaggcctcgcggcccggcgggcggcgcagcagcagcgacattgcccgataggcctccgcctgcttggtcaggtcgtcgaagacgatgagcacgtgcttgccctcgtacatccagtgctgtccgatggacgagccggagtagggggcgatgtacttgaagccggcggggtcggatgccggggcattcacgatcaccgtgtactccatggcgccggccttgcgcagattctcatgaacctcggcgacggtggtgttcttctggccgaccgcgacgtagatgcagcgcacctgcttcttcgggtcaccgctgcgccagttgtcgagctggttgatgatcgtgtcggtggcgatggcggtcttgccggtcttgcggtcaccaatgatcaactcacgctgaccgcgtccgatcgggatcatcgagtcgacggccttgaggccggtcatcaggggctcggtgacctcctggcgatccatcacgccgggggcctggagctcgagggcgcgacgccccgcgatgccgtcaatggcacccttgccgtcgatcggattgcccatcgcgtccacgacacgaccgagatagccgtcgccgaccggcacggacaggatctcaccggtgccccgcacgatcgagccctcgtcgatgccctcggactccccgaggaccacgacgccgatctcccgctcgtcaaggttcagtgcaatgcccatcgtgccgttgtcaaagcgcaacagctcgttggccatgacattgggcaggccctcgacgcgcgcgatgccgtcgccggaagtggtgacgtggccgacctcttcgggggccgcctgtgtgggcgtgaaattgtggacgaaggtgtccagcgcgtcgcggatctcatccgagctgatgctcagttcagccatggcgtttgccttcctggttgtcgcatgttgtcccggtacgggagtggtcgtgggtaacttgtcggccatggggctcaggccagctcacgttgggcttcggacagcttcgtggccaccgtgccgtcgatcacgtcatcgcccagctcgacgcggaccccgccaagaaccgacgggtcgacgtgttcggccatgtccaccggctgtccatacaatcggcgcagttgttcaccgagttcggccatttggtaggcgggcaggggccttgccacggtgacacgtgccaggatccggccaaggacctggctggccagctccatgcacgaccacagcgcgtcctgcacgtgctcgccgtcacgtaccgcccggccgaccaacatcgcggtcacggggtcgaccttgtcgccgagcagttggtcgacgagcttggcccgggcctcctcaccggcggcgtgcccggccatggcaacccgtagctcgtcatgtgtcgccagggtctcacgcaccacgttcagctcggtgcgcacctgatcggcgtctgtgctgcgcagggcgatgcgaatcgcctggcggcccagccccgaggtgaattcccgaccgctggcccaatcaagggccagtgcctggaccacgaagtcgaccgtgggcccgctgaggcgcttgcccaggagggctcccgcaagcttgccccgaccctcggcctccaacgccgggtcggtcagagcgcgccccaggtcaggctgagcattcagctcatccaccagggcgaagagttccgtactcagggacgaggtggccacgatcttgtcggctgcctcgtccaggcgctcaatgcgggtgccgttcacgttggtcactttccgatggtctggtttcgtgcgggctggttttccagctccttcaggaagcgttcgacggtgcgcttggcacgctcgtcgtcgtcgagggactccccgacgatgcgtccggccagggtggttgccagtccgccgacctgggtggtcaactggccggcggcgatctcacgctcgctggcgatctgggcacgggcctccgcgatcatgcgggcctgttcctgcgcggcctcgttcttggcatcgcgcaggatctcggcactgcgggtcttcgcatcctcgcgggcctttgccgccgactcacgaacctcagacagctgcgcctggtactgttcgcgggcctttgccgcctcagcctgcacctgctcggcatgctggatgccgccctcgatctcgctgctgcgcttttcatacagctgctcgaagcggggcgccacggccttggccacgatgatccacatgagccccaggagcaacagtcccgccaggaactcaggcagctccgggagcagcggccccaaatcgatatggggcaccaatccgttgggtgtcatcggccgaggctcacttgatgaatgccaagacgaagcccagaatggcgagggcctcaacaatggcgaagccgatgtacaccggcgtcatgatgtagccgcgggcctcgggctgacgagcgatgccctgaatggccgcggcgaagatcagcgccacgccgatgccgggtccgagggtcgccagaccgtagccgatgacgttgagcgaaccggagatctccaacggtgtcattgcatttcctttcggatggttatcttcgaatgaagatgactttggtcagtgggctgcgcccaccgaggaaccgatgtactgcgcagccaggatcgtgaagatataggcctgcaggaacccgatgaacaactccaggcacagcatcgccactccgaagaggagggcaaagacgccggtgacattgtagaagctgttgtgcacccaaccgagcagcgcggcaccgccaccaacgaacaccatgatggacatatgtccggcgaacatattggcgaagagtcgcaccgacagggtgagcggtcgggtgatgaatgaggacaggaattccagcgggatgatcaccgggtacagccacggcggcaccccactgggaatgagggcgacgcgcagatagcccaggccgtgcttggcgaagccggagatcacataggccagaaaggtcaggatcgcaccggcataggcgtagctgacgcgcgagaaggtcgggaacatgaacacgaaggtctcgccgaaccagttgctgaccaggatgaacgagaacaaggtgagcaggtacggggtgaagcggcggtagccggggccgatcatgtcgcgcccgatgttgcggacgaagtcatagacgtactcggcgaagaactgggccttcgagggaatcaccttgaggcgacgcgaggcaatcagccagtaggcgagaacacccacgaatccgataattgccagcagcatcggcttgttgaaccatgtggttccgaaccagccggagaactcgaaatcctcctggctgggcgcgtgccaactgctcactcccccgccgatgcgctcggccaggaaggtcagtgcgatccagaccaccagcatcgtcaccacaatggcaacgggatggccctttgaggtctcgggagcgtccaccacggtcgcttcattactcatgacggcccccgaatcgcttgacaatgagatacacggccgctgcagtcccgatcagcaaaccggccggcaggaaccataccgtgttgaatagcttgtctgccagccagccgagcccgccatacagcgcaattccggccaggagataggaaacgctttgtagtccgctgccgggctgggcctggtcaggatgctcgtcatgctcgaccggttcgctcatggcgtctcccttcccaccgatgcgtagatcggcaaacgagcgcgacggtgggcatccaccagtcccgcagtccaaccaatgaccatcgccaggacggtccacacgaatccattgccccggtttgccccggccagcagcccatgactcgccaggagccacagcaccagtgcgaccgctgccgcgcgcaccaggaacccggcgagcagcatggtcatcccgaaggcatcggcacgccgcaccgccagggcgtcacccacgactccggcaatgaagtacagccccaccaatcccactgcgagcaaccagccgatgaccgactcgaggccgccgacgatgccgttgaccactcctgcgggcacagcgcagaccatcgcgaacagcaggccacgacgcgtcatcgagcgcagccatgcactgttgacagaggggttcaacggtggggcccttcagagcagttgggtgcaaccatgagtactttgaagttaccacgcattgggccgcaagaaacaattcagcgttcaaccggtttgggctcgacgagccgccgtgcgggcgacttcggttggcgcatgggaaccacggtcaacacgatcgcgatcgcaatggccaccgccaccgccaggatcaccggccagtaccaggccagccccagggcgatgacgccgaaggcgatgatcgcggtccacatgtacatgatgagcaccgccttgatctgcgagtgtccacgctggaggagccggtggtggaggtgcttcttgtcggcgacgaaccaccagttcccgttccaggtgcggcggatgtaggccattgtcatatcgatcaggggcagggccatgatcgctatcggcagaacgatcgggagcagggccggcagtgcgtcgccccgactcggcgtcagtgccgacgagtcgatctgcccggtcaacgacaaggtgctgcacgccaggagaagtcccagcaacatggcgccggagtcgcccatgaacatcttggcgcggaagaaattgtggggcaggaaaccggcacagatacccgcgatcgtcgccgtgaccaggctggccgtggtggcgacgacgaattgttgttgataggcgagcagataggtgtagacgaacatcgccagcgagccgatgcccaccacccccgccgcgaggccatcgagcccgtcgatcaggttgatcgcattcacgcagacgaagatgtagagcaccgtgatgaggatcgaggtcggctcgtcgagcgcgaagatctggtgcggcaggctcacccagtacatgcgcaccccgttgagcacggcgacgcccgcagcaagcacctgacccgcgatcttggccatccagggcaggtcgatcgcgtcgtcgatcgccccgatcacgcagatgaccagcgctgccaggaagatgcccagggcatcgcgcgagaccgtgggatgacgccccaggaagggcatgtgggcggccaggaggaaggccgcgcccaccccgaccaacatggcaaccccgcccagatagggcgtcggggtggcgtggacgtcgcgttcgcgcacaggggccagcgcaccggtccggatggcgacccgtcgacacaggcccgcgaacagataggtcgcggcgaatgcggtcagcatcaccaggaggtactcgcgcatggggcggctcagtcctgcccggagcctgatccggcccccgcatcggcggagctgtcgggcgtcccggagggcccggacccggatgggacatcaggtgacgatgcgggcggggtggccgcggcggcctgatcggcctgcacctgttcggtcaccaggtcctccagcccgggggaaagcccctccagctggtcgaagccgatgacgccctgacgcaggatgcgcccggcgggggcgaccgtgaaatcaacgatggtggatgcgaccggacccggggtgcggccaccatccaggtagacggccaccgaatcgcccagcatcgcgatggcggcccccacgtcggtggcggagggctgccccgagatattggcgctggacactgccagggggcccgtgtgcaggagcagcgcccgggcgtcgtcattgtccgggacgcggaccgcaatcgtgcccgcggtctccccgagatccatgtgcagggcggtggccgcattgaggatcagcgtcaacgcgccgggccagcactccttgatcatgcgctcggcacccagggggatcgaactgaccagggcgggcagcatggcgggctcggcgatcagcaccggtggtggcatatcgcgcccacgatgcttggcattgagcaggccctggacggcatcggccgaaaaggcatcggccccgatcccgtacacggtgtcggtcggcaacacgatgttctggccggcacccaccgcggcctgggccgtccgcagcgcctgatccctctgcgtggccaggtcaaaacgtcggaaggactcttccccggagccgccctcctgcggcgatgcggcggacgtgccctgccccatctggtcggtcttgttggtttgcgcaccactcacgtgcgtcattgtcccacgtcgttgcgccggatcgccgtcacgaaccgtggccgtccggtgagatcgggatggtcctcgacgtgttcgaaccgacccgccgccgagatgatgcctgccgcggaatggccctgcatgtcgtcatgttcgacgatgagccatcccccggggcgcagcagtcgcgtcgccaccggcacgatcccacggatcgtctcgagcccgtcgtcacccccgaacagggcctcgtgcgggtcgtagtcgagcacgtcagcgggaagctcatcggcatgtgcggccgacagatagggcggattggagatgaccaggtcgacctttccctccagctgcggcagcgcatcggccatatcaccggccacgacggtggccggtgtgtcggcaaggttgcgccgggcccactccagggcctgcggggagcgttccacggcatacatgcgtggcgtgcccgggtattcactgaggatcgacttggcgatgaccccggacccggtgcccaggtcgacgatcaccggtgaggggcccgtgtcggccctgaggttgagcaactggtcgagcgcgaagtgcacgacggcctcggtctcgggccggggaatgaacacgccgggacccacctggacatcgatcttgcggaaccaggcacgccccgtgaggtactgcaccggctctcctgcggcgcgacgcctgatcaggtccgcgtagcggtcggccaccgcgtcgtcgacctcccgcgtcgtggccagaccggcaggatcaaggtcggcggcggccgccagcaggtggcgtgcctcggcgcggggcgactgggcgcctgccgaggtgagttcattgatgccctgcttgatgagggctgcgggacggtgagtgctcactgcttttcgctttctgtcgcctgacccaggcgctcggccaggtctgcggcctgtagcgcctcgatgaggggttccaattcaccgcccaggacggcgtcaaggttgtgcgccttgaagccgatccggtggtcggtgatgcggttctccgggaagttgtaggtgcggatgcgctcggaacgatcgaccgtgcgcacctgcgatttgcgggcctgttcggcctgctgggctgcctgttcctctgcagcggccaccaggcgcgcccgcaggacgcgcagggcctgctccttgttctggagttggcttcgctggtcctggctggtcaccaccacgccggtgggcaggtgggtgatgcgaaccgccgagtcggtggtgttcactccctggccacccttgccggtggagcggtacacatcgatgcgcaggtcgtcgggattgatctcgatctcgctctcctcgacgtcgggcatgacgagcactcccgccgccgaggtgtggatgcgtccctgggattcggtcaccgggacgcgctgcacgcggtggacgccaccctcgaacttcagggcgccgtagggggcctgggcgtcatgcccggtggcacggaaggcgagggtgaccgacttgaagccacccaggtcggtgggctcggcgtcgatgatctcggttgaccagccctcgcgctcggcgaagtgctggtacatgttcagcaggtcgccggcgaacaacgcggactcctcaccgccctcaccggacttgatctccatgatggcgtcgttggagtccagggggtcgcgcggggcgagcagtgcggtgagcttgtcggtgacctcgtccagccgtgccgagatctggtcggcctccgctgcgaaggcgggatcgtcgtctgccagttccctggcggccgacaggtcctcggtgagttgctgatgctcgtcgagggcgtgcacgaccccggtgagttcggaatatcgccgccccaccttgcgggagcgggcctgatcggagaccacggccggatcggccagctgcttctccagatcggcaaactcctggcgcagcccctgggcggactcgaacatcaggtcactcctattggtcggttcccacgtccgggcaccggcatctgttggtgaacatgaaacaggcgtcgagtgccagatgacacccgacgcctgtttggacagacttacttggttgcagcggcctttgccttgccgtagcgacgctcgaagcgggccacgcgaccaccggtgtccagaatcttctgcttgccggtgtagaaggggtgacagttgctgcacacgtcggcagacatcacatcaccggggaaagtgctgcgcgtggtgaactcattgccacaggtgcacacgaccttgacgtcgtggtactcgggatgcgtgctgttcttcatctggattgctcctctagtcgcggaccgggtcgctaccgtgctgcacagacggtgtcgcattggacgacgcgcgtgaaccgggccattgggtgactttacccgatcgaacgttcagtgccactctcgtggccccctgtcagtccgatccgggcgttgtcgaagatatcaacaccaggaactctgaattattccgggtcttcttcatgcggctcagcagggtctcaagggcctgctgctccttctgcccggacagggcccggcgcagcttccagatgatgtcgagctcctggcggctcatcaggagttcctcgcgacgggtgctggaggcctcgacgtcgacggcagggaagatccgcttgtcggccagctggcgcgacaacttgagctccatgttgccggtgcccttgaactcctcgaagatcacctcatccatcttcgacccggtctcgaccagggccgtggccaggatggtcagcgagccaccgttctcgatgttgcgggcggcgccgaagaagcgcttgggcggatacagcgctgccgagtccacgccgccggacaggatccggcccgatgtgggggcggcgaggttgtaggcgcgcccgagtcgggtgatgccgtcgagcagcaccacgacgtcgcgccccagctccaccaggcgcttggcgcgggcaatggccagctcggcgatcgtcgtgtggtcatctgccgggcggtcaaaggtcgaggcgatcacctccgcggtggtcgtccgcttgaagtcggtgacctcctcgggacgttcatcgacgagcacgaccatcaggtgcacctcgggattgttcaccgtgatggcattggcgatgttctgcatcaccatggtcttgccggccttcggcggggacacgatcaggcctcgctggcccttgccgatgggtgacacgaggtcgatgatgcgcccggtcatgttggtggagaccgtctccatgcgcaggcgttcctgggggtacagcggggtgagcttgccgaaatcgggacgctcgcgcatggcctcggggccggcgccgttcaccgtgtcgaggcgcaccagcgggttgtacttggagtggcgctccccctcgcgcggctggcgcacggcaccggtgatcacatcgcccttgcgcagtccgttcttgcgcaccattcccatggcgacgaaggcgtcattgggccccgggaggtagcccgaggtgcgcacgaacgcgtagttgtccagaacatccaggatgccggagacatcgatcaggacatcatcctcctggaccgtggtggtctccatctcgttcatgggactgttgcggttgccgcgccgaccctgacgatcacgctggcgacgacgccgggagcgccgaccgccgctgtactcatcgtcgtcacgacgacctgagtcattgcgattcgagtcgttgcggttcgagtcgttgcgcgtggactcgctgtggttgcgatttgactggttgtggtggcgctcgggacgctcgtcgcggttgcgctcgttcttctcggaacgattcccgcgtccgctcagctgctccaggcgggcacccacctcatcgtcgacgccctggttgctcgtgcgggggccctcgttatgggcgccgtcactgcgggaattgttcgtacgggtcgagttgcgttcgctgcggccaccacggtcattgtccgtgctccgctcggtggcggtacccgactcgctgtcggtattccgctcgcggcggctgcgtcccgaactgtgttcggcggcctcaaggcgggcagcgatcgcgtcggccgtcgacacatcccgtgccggaccctcctcgcccgtcgcctcacgcgatgcgcgcgacgctgagcgggtccggcgttcggcgggcccctcctcatggcgtgtgggctgctgctgtgcaggctgggcaccggaaccgccgcgacgcgagtcaatggcattgatcagatcgcccttgcgcatggcgctgacgcccctgatccccaactgcgcggcgacctgtttcagttcggtaagcctcatggcactcagcgtgctcatgggatctgcgggcccgttctctgcgacggcctgcgtggtttcgctcacgaatgtcctttcggcgtcgcccggggaagacccactgggcgaaagaatgtcatctggggccaaggcacgacgcgcccatcggcgaccgcacgggatccgcatggcaaagcatcggaaccgaggcgggactacgagaggatctcgcgaacgaaggaccggaagccgacgaccgcactgccagctgtggcaagacggtcagagtcgactcgtgatggggaacagccgcttggtgggctcgtttccggtctgatcggacaaggccgttgacccggatgagatacggctgcttgagcagcagctcgtgcttctaggctagcaggcgtcgggccccgagcaaagcggatcacgcaagcgccgccccggcgtcatcggaggcgggacggcgcggggcgttcaggcctgcagtcctgactccaattgctcggacgcggcgaggaactgctctttcagctcctcgtagtcgtgggcaaccggcaaatgggggaactcggcgatcacattggccggcgggttgaacagcgccccgtagtcggcctggttcaacatcgcggtgtcgttgtacgaatcacccgtggacaaggtggtgaagttcagcgactggaaggcgcgcaccgcctcatatttcccgttgggctggcgcagctggtagcccacgaccatgtcgtcacgcaccaccaggctgtggcagaacagcgtgggtcgaccgagctggtccatcagcggatcggcaaagtcgtagaaggtgtcggacaggatgaccacctgccaacgcgcccgcagccagtcaaggaactccttggcgccgggcagcgggcccatgtccgcgatgaccttcttgatggcgctcagggtgagcccatgcttggccatgacggccaggcgatggtccatgagctcgttgtagtccgagatgtcgcgagtggtgagcttcagctcgtcgatgccggtgcgctcggcgacattgatccagacttcgggcaccaatacgccctcgaggtcaaggcaggcgatgtgcatattctctcctaggctccttctgcgcgcatgagtcgaaccgaccccagcacataatcggacttctcaagttcttccaggcaaaccatcatgtcggattcctgggcctcgtgcgtcatcattgacacgcgcgccgaagcggcctcgcggccgtcctcgatcggcgtctggcggatggaatgcaccgagacgtgatgcttggccagcaggcttgccaccgacgccagcacccccgactggtcagccacccggaagcggacgtagtagcgggtgcgggtctcccccatcggtgcgagctggtgggcctggtagaccgaatgggccggtcccacgacgccgcgcatccggttgcgcgccacggtgacgaggtcaccggtcaccgcgctggccgtcggtgagccccctgcaccgggacccatgaacatcaggcgcccggcattcgctgcttccacgaagattgcgttgtaggggccattgaccatggccaggggatgcgaatacggcaccatggccgggtgcacgcgcacgctgatgcgatcgtgctcgtcgatcttggcgatcgccaggagcttgaccacgcagtcgctggcgcgggcggcctcgatgtctgcggtggagacgctggtgatcccctcgcggaagacatctgaacccgagaccggcgagtggaaggccagtccggccaggatcgctgccttggcggcagcgtcatagccctcgacatcggcggtgggatcctgctcggcgtagccgagttgctgtgcggtcgccagtgcctcttcaaagtcctggtggtcgttggtcatcttgtcgaggatgtagttggtggtgccgttcacgatgcccatcacgctgcggatctcatcgcccaccagcgattcccgcaggggtcgcacgatggggatggcgcccgcgacggccgcctcgaagtagatgtccacccgattcttctcggccgcggcatagatctcctcgccatgggcggccagcagggccttgttggccgtgaccaccgaggcgccgtggttgatcgccgagacgatgagttcccggggcggatcgatgcccccgatgagctcgatcacgatgtcggcgccaccgttggccaccaggccggccgcatcatcggtgagcagctcggggggaatgccctcgcgcggcttgttcacgttgcgtacggcgatgccgatcagctcgagatgacagcccgccttggcggcgaggtcctcggccttgtccagcagggtgcccgcaacctgtcggccgacggtgccacagcccagcagagccactcgcagcaccctggtcggcgcggtcaccctcgcgtcctgattcattgccaccctttcagcgtcccacgtcgagactgaggaggtcgtccatggtctcacggcgaatcatcgccgagagctctccgttgtgtacgcgcaccaccggagggcgaagcgcatgattgtagttactggccatttcgcggctgtaggcccccatatcgggcacggcgatgaggtcaccgggctcgatgtcggacggcaggaagacatcgcgcaccagaatgtcgccgccctcacagtgcttgccgaccacccggctcagcacgccgggttcggaggacgtgcgatttgccaggaccgcagagtattcggcgccatacagggccgggcggatgttgtcgctcatgccgccgtcgacactcacgtatacgcgctggccaccgccgtccaggtcgacgaccttgacggtgccgaccgtgtagacggccatggtggtgggtcccacgatggccctgcccggctcaatggacatcttcggcacggccatcgaatgcgcccgcgcctcgtgctccacgatctcgcgcagcccggtggccagcgcatcgggggtggagggcgaatcggcgctggtgtaggcaatgccgaaaccgcccccgaggttcaactcgggcaggtgcacgccggtcgcgtcggtgaactggctcgacagcttcatagtgcgcagggcggccacctcgaagcccccagtgtcgaagatctgcgacccgatgtggctgtggatccccaacaggtccatataggggctgtagtggcaccgcaccatggcgaccatggcctgcccgttcgcaatcgagaagccgaacttctggtcctcgtgggcggtggcgatgtactcatgggtatgcgcctcaaccccgggggtcacccgcaccatcacacgcgcatgccagtcattgtcgcggcacagctgttcgatacgtccgatctcgtccagggaatcaaccacgatgtggcccaccccgttgctcagggccagcgccagctcgtcactggtcttgttgttgccgtgcattccgatccgtgccgggtccatgccgccggcgagggcgacctggagttccccacctgagcacacgtccatgcccaggccctcctccatcacgagacgggcaatcgtccgggtgagcatcgccttgcccgcgtaatagacattccatccgtcgaaggcgctcttgaagtcacgggcccggtggcggaagtcgtcctcgtcgaacaagtacagcggggagccctcacgctcgatcgcatcaaccacgtcgattccggccacaccgacacgcccgtgctcgtcccgggagacattgcggctccacagggcagggtcgagttcgttgaggtcggccggcttcgtgagccactggggccccggggttgagacgtcggcgtgaatcgcgcccgcaacatgcatatgggtcacggtccaccattcttccagaaagccgccacgccggagtgcaggcgttcgcccgcggacggccgtgtgacgcgctggccgtagtgcaacccggggcgctaagctgtcggacggccaccccaaggcggccatgctcccgtagctcaggggatagagcaccgccctccggaggcgggtgcgagggttcgaatccctccgggagcgccgtgccggacccgggacgtgcagcaagtccgggcgacccggatcccagcccggaaccgaagggctccccgcatggtcccctgctcgccatggggccctgcccgatcagcacgagcgcccacccgatcagcctgggccgcccggtgaggctcatgcccccggcagctcatcgcgcacacccgtggcacgagccacctcgtcgggatgatcacgtgcccagtcgcgggccttcgccgacagcgccgaacccgagacgtggccaacgaccagacccaccaggatgaccgccaccaacaggatccagccaacccgtgacatccaatggcttgccaccgagccgagtgcccacatgagcgcggtggtgccgcccgcccacgccactgccccgcagatgttggcgatcaggaaccgtcgatagctcatccgcaggctgcctgcgagggggcccgcgaacatccgcagcagggcgatgaaccgcccgaagaacacggccgtgacaccgaaacggttgatcaagtgctcggcgtaggcaaggcgcaccgcggaggcctgtaccggaaagcgacgacccaaccagccgaacagtcgcgggccgaggcgccggcccacggtgtagccgatggagtcgccgatgatcgccccagcactcgcggcgatcccgatgccccacgcggagaagcccgcgtcgggatggtgggtaagcaggaccaccgagatcaggatcgtctcaccgggcagcgggaccccaaggctctccagtccgacgaccaacccgacgagcacataggcccagccggccggaagcccgaagaagaatcctgacaggtccatcgcccacccctcatcgctggccaaccgccagttgccatcatgtccccactgcccggcaagttgccatcatggcaaccgggaaccgacatcgcacgcctgtccgcgggctgtgagtgtgcgtgccgaacccacagggcgtgcggtgggatccactggatgctttgatagccttctcgtcgccgaaggtcggtgcatgggaccaagtggggcggacatggcggaattgcccgtgacgagcgcgggcgcgaccgccgccacaccagcacgcttctccacgcggatgtcgcgacaattcaccctgtcgttcacccgcgaacggctgcgctcggccaagttcttgttgttcttctggttcgccgcgcgcttcctcatcctggcgacctgggcgttcatcaccccggccacccagggcgacgtcgtgtactactaccagaagatccaggtgttgttcagcgatggtccggccaacaccctgcaggaatatccgacccctgtgatctgggtgttactgatcccctatctgatcggctttggcaatgaacacggctatgtcattgcgttcgtctgcatgatgttggccctcgatgcactgttctcgtggtcgctgtggcactcaggtggctctatgggcgggcaggcggtcgtcttctggacactgttcctggccatggtgggacccaccgccttcctgcgcttcgacctgatcacctcggtgttggcgggctggtcgatcatcttcctgttgcgacgctatagcgcagctgccgggggcctgactgcgctgggggcttcggtgaaactctggccggccctgttgtggccggcgctcctaccgggcccggccaggcagaagttccgggccaccgcgggcttcctgctgaccgggatggccatggtggggctgtcgctgctgtacgcggggtgggaccgactgttgtcgcccctcacctggcagcagggccgtgggctgcagatcgaatcggtgtgggcgacccttccgatgttggcccgcaccgtcaactccgacaactacgccgtcaccctgtcgcggtaccaggccttcgagatctggggcccgggggtgaacaccctgctcagcgcctcggacatcttcttcgccggcgggcttgccgtggcggtcctggcctatctcgtgtggctgtggcgcggacatggccgcctgatcgaggcggtcgtgctggtgcagttcgtgatcatcgtcatgatcgtgacgaacaagaccttttcgccccagtacatgatgtggctcggtggcccgcaggcggcggcattcgccgtcctcggcacgcgcagccaccatgtggaggagttctacgtcgaccgctcccggctcaacacgctatcggtgtggatcctggtggccaccttcctcacgctgttggtctatccgatcagctacgacttcctggtcaatgactggaatgtgcgcgacagcctgctgaggttcccggccaccctgttgctcgccgcccgcaacatcgtggtggtaatcgtcctgatcgatgtcatcaggtgggtgtggagcttcctgaggccccgggccgtgaaggccgtgcgacaacgccgccgtggggtcgaggcccctcagtgagtcgccaagcacttgaccgacgacccgactcccgtccacccgccagcattccggtgacccggccggtgacagcgagtcgcccggagacggcgagcgccggcgtccgccggggatggcatcgccggtccggcatagcgaccatgccacgtgtccgcccgaacggctggtgggccgtggtcgcctggatcgtgtcgcgatccctgatggcgtgcctgttcatcaacctgggcagttacctgcgctccgatgtcatctactacttcacctccgtgcagggcgccagtcccatgcacctggccggggtgctgtccgagtatccggtaccgatcgtgtggctcatccagctgctggcagcgatctcggggccatccgccgatgtcttcgtcttcgtcttcgccgcaacgatgggtgggctcgatgccgcctgttgccgatggttgtggcggcactcaccacgcgcctgcagcttgtggatcgccttcaccttcctgatcggcccgctcatctggttccgcatcgacctggtgccggccgcgtcggtcctggccgcgctgaccatgacaacgcggcgcccggcatggtccggggcggccgtcgcgctgggcgcggcgacgaagctgtggccggcactgctgatcgttcccctggccggcacgcgacgcagcgcacgacgccgcgcaggcggattcctgctcgtgggcgcactgatcggcacggccgtcgtggtcagtcagggtttggcccgttcggcctctcccctcacttggcaggcgacccggggcctgcagatcgagtcggtgtgggcgacgctgccgatggtgcaacggctggtgtcgcccgatgacagctggtcagtggccgtcagcagtttccacgcctacgagatctccggcccgggagtggcgggatggctgcaggtctcttccgccgccacagccgccctgctggcgctgacggcgctgctcggctggctgatcgccctggacggcatgggacttccgggccaccgacgcgcgctgccggccgatcccgaccgtgacgcccagcggcacgaagccatgctgtgggcattgctcgcaatcatcgtcggcgtgatcgtggccaacaaggccttcagcccccagtacatgatgtggctggcgggacccctggcgatgttgtgggccgagggcacccgggccggttcccgcaggcccgcacggcgcgtgaccatcatggccctcgcagcggccggcctcacgcagcttgtcttcccgctcaactacacggccctggtcggcgatcatcccggcgggttcgtgaccacggtgctggtggcccgcaacctggtcatggtcggcctggccctgcactgcacccgacacgccctgcgggccgcgtggcgggtgggcctacgcagcgatcccgcccctgattccgggagagaacttgtctgagtcgaacacaccatccgggtcgaacgcccccgggcccaccgcagcgtccgccgacaacgggtccacgacgggtgtgaccgtcacgatcggcccacccgccatcgcggacgcccgtaccgggagctgggtggcacgcttccccctgctggtggccttctgggcgctgtcccgcgtggtcatggcctgcatcttcatgaccgacctgtgcagctacatccgcaacgacgtgctctactacggcacggcggtcgccagctcaccggtccccctgctcgaccgcatgaccaatgtgctcgacgagtacccgacgccgatcgtcgggttcctccaggtgatcaacgcgttggcgggcggctccacgtccaccttcgtctccgttttcgtcctcgtgctctgcctggcagacggtttcgccgtcgctgccctgttcttccgtgaatcgccgcgagccggctgggtctgggcggccgcgggcctgctactggggccgctgctgtggttccgcctagacctgttgccggcgctggccgtgctcggggcactgcactggatggatcgtcgccccaggctggccggggtgatgatcgcccttggtgccgccctgaaactgtggccggccctgctgatcattcccatgatgggccggggccggctggcccgctcccgaacgctgggcttcgtggtggccgggctggtgctcggtctcgggtcgctgctgacgcagggctgggcacgctccgcctcgccactgacctaccagggggatcgtggcctccagatcgaatcggtgtgggccacggtgccgatggtgcggcgcgtcatctccggtgattcggggctcacggtcttcttcagccagtacaaggcctatgaggtgtcgggcccgggcgtggccggctggatccaggtcagcgacctgctgctcgtggtgatgatcgtcgccaccgtggcgctgggatggttgatcggcctgcgcggtgtcggcctgcgcgggcatcgatgggctgcacccggtgagaaggacctgggggccatcgactgggcgatccagttgtcgctgctggccatcatctgcggggtcatcgtggcgaacaagacgctcagcccgcagtacctgatgtggctgttcccctcgttggcgatcatcacggcccgcgcccgtggcgagcgccaacgccgggtcgtgcggcgcatcctggcgttcgcggcgacgtcgctggccctgacgccctgggtgttcccgctgggctactccgggttgatctcctccacaccgaatgcaggggttacctggctgctcgtgctgcgcaatctcggactcgttacgctgaccgcatattcatggtttgaggcgtggagggcggctgttcgcagcggggttttcgaacccgaactgtagagtcggagaggtaagccgcccgcccagaaatcacatggaagtgagggacgtggctcagccacgaacatcatgggtactgacaaatttggggccaatgactggctcattgccgatatgcgccagcgctatctggcagatcccacttctgttgatgagaggtggcgcgcatacttccaggcactgggagtcacgcccgatccgtcaacgccggtggcaagcccggccccggtgaccccggcgccaacgcaggcccccaccccgcaggcatcgaccccgcaagcaccgacctcgagcgcgccggggcccaatgaaccggcccaaccaccgtccagccgcgttcaggcccccgttcccaccctcgagccccgcgagatgaggcggaacgcccccgagcagcccgggatgggtggcggcctgtcggccgatgtgcccaacccggcagtccgtcccgccaagaaggcggagggccaggccacccgcaccgtgttgcgcggcattccgaagacaaccgccgtcaacatgaacgaatcgctgtcggtgcccacggccacgtccgttcgccaggtgccgatgaagctcgtcatcgacaaccgggcgctggtcaacagcttcatggcccgcacccgcggcgggaaggtgagcttcacccacatcatcgccttcgccatggtgcaggccatccgtgacgtcccggagatgaaccactcgttcgacatgaccgacggcaagccgacgctcgtggagaacccggcgatcaacctggggatcgcgatcgacacgacggcgaagaacggcacccgggagctgttggtgcccaacatcaaggacgccggcagcttggactttgcgcagttctggtcggcctacgaggatctcgtggaccgcacccggtcgggcaagctgacgttggaggactacgccggcaccacggtgtcgatcaccaacccgggcggcatcggcaccaacatgtcggtgccgcgcctgatgagcggccaggccatgatcatgggcgtcggaagcatcgactatccggccgccttccagggaaccagcacgcagcgcaccaacgacgccgcgatctccaaggtctgcaccctgacgtccacctatgaccaccgcatcatccagggggccgtctccggggaattcctgcgtcgcatccaccaattgctcctgggcgccgacggcttctacgagcacatctatgaggcacttcggatcccctatcccccgctgcactgggaccgcgatttcaccgcgaactcgcagtcggagatctccaagggcgcccgcgtcaccgaactgatccaggcctaccgggccgagggccacctgctggccgacctcgatccggtggagtaccggatgcgcacccaccccgacctcgacctggccacacatggcctgtccatctgggaccttgaccgtgagttccctgtgggccgcttcggtggcgaggaggggcgccacatcgtgctgcgccagatgctcgacatcctgcgcgagtcgtactgctacacgctggccatcgagtacatgcacatcgacgatcccgaggaacgggcatgggtgcaggaacgcttcgagcgtccgcgtaagccccgcccccgggaggaacacctgctgatccttgaccggctcagtgaggcggaggtcttcgagaccttcctgcagacgaagtacgtcgggcagacgcggttcagcatggagggcgcggagtcgtccatcgtcatcctgtcggaactgtgtgcggccgccgccgatggtggaatggccgaggtgagcatcgggatgccccaccgtgggcggctcaatgtgctgaccaatgtggtgggcaagctctacagccaggtgttccgcgagttcgacaacaaggtgcccaccgaggaggacatcaccggcgatgtgaaataccacctcggcgcgaccggccagttcacggccatgtcgggggagaagatcaaggtctcgttggccgcgaatcccagccacctggaggccgtcgatccggtgctggagggcattgcgcgggccaagcgtgatcgtcagccggttcccgccgactaccccgtgttgccgatcctcatgcacggcgacgcgtcgttctcggcgcagggcatcgtctacgaggtgctgcagatgagccagctgcgcccctaccgggtgggcggcaccgtgcacctggtggtcaacaaccagctgggcttcaccacctcacccagcgacgggcgttcctcgaagtactgcaccgatgtggccaaggccctcggggcaccggtgatccacgtgaacggcgacgatcccgatgcctgtgcccgggccgccgaactcgccttcgacttccgggcccgcttccacaaggacgtcgtcatcgacatggtctgctaccgcctgcgcggtcacaatgagggtgacgatcccagcttcacccaaccgcagatgtatgacctggtggcccgcaagggttcggtgcgcaaaatctacaccgacgccctgatcgggcgcggcgacatctcggtggaggatgccgagcaggcggtcaaccgcttccgggcccgtctcgaggaagtgttctcgatggtccgcaatcccgagatcccccgcgacgaggtggaccatcaggttgcgtaccgcctggcgccccagtacccggccaaggaacgggccgccagcgccccgcccactcccacccgggagcagttcgagcgggtggccgacgtctatgagaacctgcccgaggggttcaccccgcatccgaaggtgggtccccagctcaagcggcgcgctgattccatccacaatggtccggtcgattgggcgaccgcggagctgttggccttcggcacgctgctgcaggatcgtcgccacgtgcgcctcgtcggacaggacacccgtcggggaaccttcagccagcgcttcggtgccgtggtcgatcgggtgaccaacgaggcctgggtgccgttgaagcacctgtcggacgatcaggcccccttcgacatctatgactcgaacctcaccgaatatgccgggatgggctttgagtacgggtactcgacggccgctccggacgccctggtgctgtgggaggcccagtacggcgacttcgccaatggcgcccagaccattgccgacgagttcatctcctcgggcttcgccaagtggcagcaacgctccggcgtcgtcctgctgcttccgcacggctatgagggtgcgggacccgatcattcgtcgtgccgcatcgaacgctggttgcagaccgccgacgaggggaacatcgccgtgacgatgcccagcacggcggcaagctacttccacctgctgcgccagcacgcctatgtgaactggcaccgtccgctggtggtggccacaccgaagtcgatgttgcgcaacaaggcggcggccagcccactgagtgacctgctggacgagccctggcggcccgcgctggccgatcccaccatcaccgatcccggagccgtgcggcgcgtcctgctgtgcgccggcaagatccgctgggacctggtggccgagcgccgcaagctcggtctggacgggcagatcgccatcgtctccctggagcggttgttcccgctgccgaccgccgagctcgccgagatcctccgggcgttcccgcaggtcaacgacttccgctacgtgcaggaggagcccgagaaccagggggcctgggaattcatggaccgcttcctgacccccgcgctctcggaggcgctgaacaggcccttccggatgcgtccggtcacccggccccgttcgtcggcgccctcggtcggctcccacaccgtgcacctggcgcagcagcgctcgttgctggcggaatcgctcggccaggactgatcccatcgtgcccggcccgcccgtcacggtccgggccgggcacgatgcacgtccgcccgcgagttaatcggtcttgcgggattcttgtcatgccgggaccctgttgaaaactctgcgaacatggcagagtagtcaggcggggattctttgcgttactgacgttcttccccatcccgcttgatcattcgcacccggcgcccagtgtcatcggacgcttgtgctttgcagaaggagtcacacccagatggactggcgccacaaggctgcctgcctcaatgaggatccggagctgtttttccccatcggaaacactggtccggctttggcgcagatcgaagaggccaagaaggtctgccagcgatgcgaggtgcgcgaagagtgcctggcctgggccctggaggccggtcaggaccacggcgtatggggcgggatgtcggaggacgagcgccgcgcgatgaagcgccgggccgcgcggtcacgtcgtagcgcctgaacagcctgctgatacagaaaggtcgtgcccgcgaagcctgcgggcacgaccttctgcttgccgacgccaccggcgggcaggacccgccagctgccgttgctggctcagacgctgagcgtcgacgccggcaccacgatgcgtgaggtggctcccggaccgtcggcattgttgaacagggtgaactctccccccagatcggccaccagggtggtgacgatggaggtaccgaggctgttggtggcacccatctggaagccctcgggcagcccctccccctcatcgacgacgtcgagcaccaggtcgccggcggcattgcgctggggacgcacgaagacatttcccgaatgggttgccagcccgtgctcgatggcgttctggcacagctctgtgagtatcagggacagggacgtggccaccttggccggcacgagtccgaagcttccctcacgcttggcgcgcacggtgcccgacgccgccgcaacgtcgccgaccatctgcaacagcttgtcggccacctggtcgaattctgcctcctcgtcgtagctctgcgagaggatctcgtgcaccacggcgatggactggacccgattcgtggcgtcggtgagtgcattcttggcctcatcggagtgggtacggcgcgcctggaggcgcagcagcgcggccactgtctggaggttgttcttcacccggtggtggatctcacggatcgtggcgtccttggtgaccagctcgcgttcgcggtcgcgcagctcggtgatgtcgcggcacagcatcagtaccccgacctgtcgcccgtccttgcgcagttgcaggacgcgggcgcggatgcacccggcatcgttctccaggtcgtactccccggcgatgtcggtgcggaagactgactggctgggctccgattcatggtcggcgaaggtgccctcgccgtggggggacaccgcaaagatggacacccgcaggctgtcgggcgccggatgatggacatcttcgcccaccaggtcccccaccatccccagtcggcgataggcggacaccgcgttgggactggcgtacttgatggcgccgtccatgcccgcatagatcaacccatcgcccacccgcggactcatcgagggatcgctggcggggctcacgggatagtcggcgtgatgcaccatgtcggtgaggatgtcggcgatttcgaggtagtagtcctccatcgcccccggcgcacgcacgcccatccggttggtgtggcgttcgacgacaccgatcacatcgccgtggcgcaggatcgggatggcccacacgtccaccgggataccggcccgcagccggttgttgctcgtctcgctgacctcgcgcgacatgaaggcctcggtcaccagcgagtcgggctcgtagcggatctcatcaccgacgacgtcatcctcgagcgccgtcggcccggtcaccggacgctgctgggctgcgacccagaagacgttctcgtcctcatcggggacccacagcaccaggtcggagaacctcatatcggccagcaggtgccattcacggaccagggaggtgagccactcgcgatcatcctcgtcgaggaccgtgtgatcagccaggacccggttcattgacaccatgggaccaactttatgcggtggacagctccctgccctgcccccgggcccgggctggtcgtggtgggccggtcgcccaccatgtgcctgcgctggcggccccggggcgcgggttttcgcggcgatggcctgtttggggcagggacttgccacgtggcagaattggaatccacgcccgtagacctcggtatgcggggatacttgaattgcgccgaacccccggttcggctgcgggatggagggcctatgggaaagaccggacgcaagcgtcgtgctcgccgaaagaatgccgccaaccacggcaagcgacccaacgcctaatttctgaccactactaccgatgatgccggcacccccagtggggatgccggcatcatcgtctgtcagctacatcgtcagtcaactgcattgtctgtcagccacatctccctggcgcgacacccggggacgaaaccgcgaggatcatcgtcgcggacccaccggagcctgacgcccgggcggggttcaggcggattcggtggtgacgtcgccgcccgacatggaacgacgatgctccacgctcaatgcggtgatgcgggtgcgcagggccggcgacgcacagggtgtgccggtgcagcgcttgaccatcgatgagatcatctcctcgatgtcgaagtcgttcatacagctctcgcagatcatgaggtgatggcggatctcgtccgcgttggcctcgggcagctcgccgtgcaggaatgcctgcaggctacccaatgccatctcacaggcatgctcgtcagtggctgacacgaagtcgccatggcccatttcactcatgattccggtctcccccgattccattctcacgtgcatagtcggccagcagcttgcgcagttgcgcacgtcccctgttgagccgtgacatcaccgtgccgatgggcgtgcccatgatctcggcgatctccttgtaggagatgccctcgacatcggcgagcaggactgcctcacggaattcgtcggacagctgctcgagtgcattggtcactgccgcatccggcatctcacgcagcgcctccatctccgccgaccgcagcccggtggcgtcatgggacgccgccttggccaactgccagtcctcgacatcgtccgacccggtctggggctgacgctgcgccttgcggtaggtgttgatgtaggtgttggtgagaatgcgatacaaccaggccttcaggttcgtgcccggcctgaactgcttgaacgagctgaacgccttggcgtaggtctcctggaccacgtcctcggcgtcgctcgggttgcgcgtcatgcgcaacgccgcgccgtagagctggtcgatgtagaccatggcatcgcgttcgaagcgctccgcccgttcggcatccgtctcggtatcgcgcacgtcgccaaccggctcggcggatgcgccgcgagccgatgaattagtcgcaggggttggaatcgtcatcgcatatgacagtaccgaactccgcggttgggtgatcgtctgcacgccatgaagaacgtagccaacgaggtctcttattcccccgccatgatcggctcggtcaatccggggtcatcggtgcggggagaattcacccgccgactcaccgggtgggcgctgagcaggccggccgccaggggtgcgatgaggcccagtgcctcccggctgtcggtgcagctggggtcgagccagtcgccccacgcgtcgggctggagcagtaccgggcggcggttgtggatggcggccatctcgccggtcgcctccgtggtgatgatggtgcacgaggacagccagctgccctgtggcgaacgccagaagtcgtagaggccggccagggcgaggaggccgccgtcggcgggctcgatgtagaacggtcgggccggcacggacttgtccgccgggtgctgccactcgtagtagccactcgccggcaggatgcaccgacgccgcgccagggccgtgcggtacaccggcttctcgtcgagggtctcgacccgtgcgttgatcatgcgtcgggtgctgccgggccccttcgaccatgacgggaccagcccccagtacatgcccgcgaccttccgcaccggatggtcctgtccgcgcgtgacgaccaccgggatcgtctgggtcggggcgatgttgaaccgcggccgcatccactgcgggtagtcggcctgcggctggccgggggtcagcgccagcgactcacccgagtcctcggcgatctcactgatgtcgaagacctcgaccaattcatcgggatcggcgctcagcgcatatcttccacacacgccatcagggtacgcgcgggccccacggacccggggcgaacgcccaccgccctgtcccctgacgtcccacctcgttggtccaccccgttggcctcccgaatggcccgcacgccgcgaccatccgggaggactcggtagcctgaacacatgactgagcacgttgccggagaccgccagaccgctgccgatccccgcgtcaccacctcgcagggctggccggcgccccgggcacgcgtccccctccatgcgacggtgcacgtgcccggctcgaagtccgaggggaaccgggccctggtgctggccgcgctgggcgacggccccagcaccatcaccggcctgccggacgcccgcgacatccgactgatgatcgccgcactgcgtggcctgggcacaacgatcgcccccggcgacgcccacgaggtcacggtgcacccgggtccgctgcacgccgccaccgcacccattgattgcgggctggccggcacggtgatgcgcttcgtgcctcccctggccgcgctggtggcgggcaccacccggttcgtgggcgatgaccgggctgccgagcgtccgatcgccccgctgctcgagggtttgcgccagctgggggccgccaccagttcagacgcgatccccttcgacctcacggcacccgacgaactcaccggacatgaggtgagcatcgatgcctcggcgtccagccagttcatctccggcctgctgttggctgcggccgccttcccgcagggcatcgatctgatgcacaccggcgccaacgtgccttcggcgccacatatcgacatgacgatcgccatgttggcccgtcacggcgtgagggtcgcacaaccggagcggggacgccgctgggtggtggagtcgggaatgatccgtgccgccgatgagcggatcgagcctgacctgacgaatgcggcggtgttcctgatcgccggcgtgatcaccggtggctcggtggccgtggccgactggccccgacgcagcacccagcccggggcactcatcgggcccgtcctggcaaggatgggtgccgccttcgccaccggggcgggccgggccaccgccacacaccgcgacgacctgcagggcgcggagcttgacctgcgccccgccagcgaactcacctgctcggtcgccgccctggccgtcgccgccagggggacgaccaccatccgcggggtgggccacatccgcggccacgagacggaccgcatcgcggccatcgccacggagctgacccgcgtcggcgtggacgtcgccgaactgcccgacggcctgcgcatcgagggcatggcggggcgccttgaccagctgcacccaagcaccggcgatggcctcttccggtgctacgcagatcaccggatggcccacctgggcgcgctgatcggactgatggtgccgggcatcaggctggacgacgtgggttcgaccacgaagacgatgcccgatttccccggcgaatgggacaggctggtgaacgcacggtgagcccccgccagacccgcggcgtgatcggacgcggaaccgatttcgacagccacgacttcgggcgtcccgcgaagcgcacccgcccccgcaccaagcgtcgccccgattactccgaggcccccacggcgcgggtcatcacggtcgatcggggccggtaccacctcctgctggacgcaccggattccccgcgccacctggtggcggccaaggcccgccagctcggccgcggtgcggtgatcgtcggtgacgtggtgcgcgtggtgggcgacaccagcggggaggagggaaccctggcgcgcatcgtgcaggtggagccgcgtcgcaccgagctcaaccgcaccgccgacgacaccgatccctatgaacgcccgatcgtggccaacgccgatcaactcgtggtggtgaccgcactggcggatccccagcccagcgccggcatgatcgaccgcgtgctcgtcgccggctacgacgccggcgtgaagcccctcatctgcctgaccaaggccgacctggccgacccgacggagctggtcgacctctacgagccgcttgacgtgccgatcttcgtctccatgccggacagcaacctcgatgaactgcgtgccgccctagcccaccatgtgacggtgttcgtcggacattccggcgtcgggaagtcgaccctgaccaatcgactcgtccccgatgcggatcgggccacgggcgtggtgaacgatgtcaccggcaagggacgacacacctccacctcggccatcgccctgcagctgccgcccttcgcgggcgacccggaggcgggctgggtgatcgacacaccgggcgtgcgcagcttcgggctcagccatgtgagcgcggagaccatccttgaggccttccccgacctgatgcgtttcaccgctgactgcccccgtggatgcaaccaccacgcgggagcccccgagtgcggactggacgcggcgttggcccgtggcgacctgtccgcccagcgcctgacctccttccgccgcattctggaggcggtggacggggccagggcggactacagctcggtgcaggagcgcaaccactagtcccacccggacgggcggcgagcgcgctcacccacaccactagagtctgggccatggctgaccgaattgattccacacgctctgatctcacggccgatctgctgctggcccagcgcatggcatccgaggcggacaccatcaccactggccgtttccgggccagtgacctgcgggtgcagaccaagccggaccacacgccggtttccgaggccgacaagggcgtcgagggcatggtgcgggccacgctggccaccgaacgtcccgatgatgcggtccatggcgaggagatgcccgacaccggatggggatcacgtcgctggatcgtcgatccgatcgatggcaccgcgaactatgtgcggggcgtcccggtgtgggccaccctcatcggcctgatggtcgacggcgagatgaccgtgggcgtggtcagcgctcccgccctgggccgacgctggtgggcctcgaagggccatggtgccttcgccggccccgatttctcgcggggaacgcgccttgccgtgtcggccgtcggcaccgtgcacgacgcattcctgtcctattcgtcgctcggcggctggtcgcgcgaccatcgcgggcaggcctttgccgagctgctggccagttgcgggcgaacgcgcggtttcggcgacttcttcagctacatgctggtggcggagggagctgtcgacctggcctgcgagcccgacctggaactgtacgacatggctgcgctcgtgccgatcgtcaccgaggcgggcggccggttcaccaatctcgagggtgcgccgggaccggtggggcggggtgccctggcaagcaatggcctcctgcacgacgaggtgctgaaccggctccagcgcgacgaccactgacccgggagccccgatcgggaccggtgcccgccggctctcggccgtcatcggtctcagcggggcccgggcgctcccatggcgccacccatcgtggtgccggtcgactgattcgccgtgaccgtggtggcggagccaccattgacgctcaccaggtagcttgagccggcgctgatcgccgaggagctgaagacgatgttcccggttgccttggccacggtgtagctggcgatctgggtgccgtcggtggtggagatcgtcacgctctgcccggcactggccgtgagttcgctctggagccaggcctgtgacgaatccgtgtcggggctctcggccatgcccgagctccctgctgcgaacagcgttccgccgctgatcctcagcgtgccaccggtgtccagggcaccattgcccgagtcggtcggtccgttcacgacgatggtgccgccgctgatcgtcatggcgccattggaatccagtccatcgccgcccgcgtcgaccgtgatcgccccgccggtgatcaccatcgtggagttcgacgccgacccggcgccgggatcgtcggcctcgccggagccgtcggaggcattgatgccatcatcggagctcgtgatgttgatcgtcgcggcgttgagggtgatggcgttggactccaggccctcatagctcgcggtcacgtcgatggtgccgccgttggtggtcagggcgttgtcggcgtggatggcgtcatcgccggtggacagcttgagcgtgccgccgtcgatctgcacggtgtcgttgctgtgcaccgcgtcgtcggacgaggtgatggtgtcggtcccatcgctgatgaccagctgcgccccggccttgatgcccttggtggacgcggcatcggtgctgtcgctgggcctgctggacgaaccgccggcggtcgtgatcgtcaaggaggcgcccgtctggacgaaatcgctggtggcgtccacgccgtcacccgcggtcgcattgaccgcgatggtgccgttctcgatgtccacatagccacgcgtggagtcctgcgagttgtccgacttgatgccgtccccgccgctggtcacgttgatggtgccatcctccacgatcacatagtccttgcccctgatgccgtcatcaatggcctggacccgaatcgtgcccgagacgatcaccaggccgtcggtggaggcgatgccgtcgttggtcctcccgtcgacgctcagggaacccgtgccggcgatcgtcaggtcggcacgcgaatacagcgccgcgttggccgcgccgtcggcgctcgtgtcatagccggatccgtcggtcagcgtgttctgcgatccgtcggcaaggatcacgttcacctcgtcggcagcctggatgtcgatcgccgggccgctgctcgacgtgatgtcggcgccgtcgaggatgatgcgggtctcgccggaggctgttgagttcaccacgagccgtccgtcggtgagctgccccgagaccttgtaggtgcccggctcggtgatggtgacggttgaaccatcgatgcccacgcccgggccgctggcggacgcggagctccccgacagggtcaccgtcaccaccgaggatgcctcatagtcaaggtcgctcgccttgtagtgcgagtccttgttgtcggccaacaccgattgcgcactcgacgagacgctggtggccgcggcctgcgcggaggcggtcgtggtggggctggacgcggtggtcgcgccgcagccggtcagcgtggccgcgacggcgagcgcggccagtctcttctgccatgacaagttcatgatgattcgctcctcattgtggcggccgcggtctcagggcggccttcgcgtagtcgtgaccggagatgtccgatggtcgaatgccaccggttgtggggcagcccgggctcaaggatggccaggccggtggcgaacttgctgaaacggtggggccgaaccccgatcgaccacagcaggtggtccacccggcccggtgccatgcccgccgacttcgtctccaccaccgtcagctcacccagccgcaccgcgcggacatcatcggccgaggtccagatgagtctgcggtcgagggtgacccgcgtcccgctgcccggttcgaccagggtggtccgcagataggacgtgttgagccggggcgccagggcatccagcgggacagacggcatgccgcacacggacaatgcccggtgcatctcgtggcggtccccggcgctccaccggccacgctcggcgacgtcgatctgcaggcgttgcttgacggtccgttccccacgacaggtcttcacctcgagccaccgcatgccgctgtcgaggtagtcgcgctcgcggatcttccatcgtcgccggcgtccccgcgccgaggcgaggtagctgtcctggccgggggtgtcgaagtagaccgacacatagcggaactcccggatgcctgcgatcgtgaggaccctgctgtcagcgggcagggccccgaggaaggtccgcacctcggccggggtcgccaggtatttcctgtccacccgcgtctgcagggcggcggtgcggttcagctcgtcgagtccgatatccgccagatcggtgatcgtcctgctcatgcgacggcctcacgcgcaccgggaacctcacgctccgcacagggcaccggggcacgaccatccaccgcgatgtccggggcgccgccagcccgtgatccgggccggaagcgcacctccaccaatgtcgtgtcgttgacgaagtcgaggcgctgcacggacaccgacaggatccgcccgcccaggcgctcccccagcgccgcgcgcagctgcgccgcatcgggatacgcccgatcaagggccaccacctggcgctgcatcccgcgcccgatccaccgggagtcgctgatgcaggtgaccgccacgatcaacgccatgaggggcaccgagtaccccagtggcacgtccactccgccgagcaggcccagcgccagcgcgctgaaatagtaggcggtctcgatctggctcagctcctccgaacggagccggatgatcgacaacaccccgaacaggcccaggccgagcccgcctgcaacactgctcaccgacaaggccgtggaaactgccagcacgccgacgttgacgctcagataggccacgaccatgtcgcgtcggtggtggcgcggcaggtagacggcgaaggtcaggatgacgatcatcaaggcgtcggcgccaagggcaacaaggtcggtcatgggtggctcctgattcggaatggatgacgttgaatcaacccgccgccgctgtcggttctctgagctggaatcggcatgtgcctatgcacctgacgtgccagaggaaacccagcgaatcccctgccggtgcacatttgtcgcgggaagtgtgtggccatgactcacttacccagcaggttctcccggcgcgcggtcctcaccggggcaggcgtcgccgtcgccggtggcggcgcggcatgggccgcggagagattcctcattccccatgtggagaactcggacgtcgcggctgccgaggccgcagccagcgcctccaattcatccagcaccggacagatggcggccgaccggcgcgagatcggcaccaactactaccgcaacggacagacccagctgaccatcgccaaccacagctccggcaacggctccgatgcgctggcctggttcgtcgccgatctgcgcatgggcgatgccacggtgcttcgatcggccttcgccaacaaccagttcggtgagaacatcacccaggacccctccacgatcgccacggcgcatgatgccgtcttcgccgtgaacggggactactacggatttcgtgatgacggcattgaggtgcgcaatggcgtcgcctggcgcgacaagggcacccgacagggtctgtcgctgtaccgcgacggcgcggtacgcctgtatgacgagaccgcgacgaacgcggcacagttggtgtccgagggtgtctggaacaccctgtcgttcgggcccggcgtcgtcgccgactcgcaggccgtcgggggaatcgaccgggtggagatcgacaccaatgtcggcaaccactccatccagggggaccagccccgcacggggatcggatacctggccgatggccacttcgccctgctggtcgtggacgggcgcagcgcgggatactcgcgcggcgtcacgctgcccgaattcgcgcagatgttcgtggacctcggtgcccgcaccgcctacaacctcgacggcggtggctcgtcggtcatgtacttcaacgagtcgctggtcaacaaccccttgggcacgggccgggaacgcggcgtatccgacatcctctacctggcgtgagggggcgtcatgctcgttctcatacccagcttccagccggatcgacggttggtggaactcgtggatgacctgcgggcgcatcccgacacgagcgacatcctgatcgtcaacgacggctccggaccggactactccgcgctgttcgccgcggctgcggcggccggcgccaccgtcatcggctatcccgacaaccggggtaagggacacgcactgcgggcgggcttcacctgggcgatcgccaaccgccccggggagcccgtggtgtgcgccgactcggacggacagcacgccgctgcggacatcagggccgtggccagggccacggccctgcccggcgcaggcctggtcctcggcacgaggaacttcggctccccccgcgcccggccggacgccgaggggatcccgtggcgcagccgcctgggcaacagggcgacggcccggctcttcgcgtgggtgaccggcctccacctgggcgacacccaaacgggccttcggggttgccccgcacccatgctcggctggctgtgcaccgtccccggcgaacgcttcgactatgagttccgggtgctgctcgcggcgcgccgagccggctggccccttgtggaggtcccgatcgccaccgtctattcgcagcacaatgaatcgtcgcatttcagaccaattcgtgactcggcacgcatctatgccccgttggtcggccacattgcgcgctcggggtccgggcgtctgctggtctttggcgcctccagcttcggggccttcctggtggacctggtgctcctgctccatgcgaccctcgggaacctcctggtgtccgtggtgggcgccagactggtcagctccgccgctaactacctggtgaacgatcggatcgtcttcgcccacggtgtgggacgacgcacaacccgaacctccctgccccgatatgcgctactggcgggcgtcctgctgggtgccaactacggcctcatgtggcttggcacggtgccgctgcacctaccgttggtgcccaccaagttggtcaccgagctgggcctgttcgccgtcagctacgtggtccagcgcaccctggtgttcagggcggcccgaacacgcaccacgccctccacccccgggcgggtgaagggcgtggccgctcggcgaactgatgtgcgcgtcagcggatgacgcggcagctgatggtgttgggcacctcggcgaggtcttcctcccagccggaggtggcagcggtcacgtcagtgacggcgtagcccacatccccccgcgtgctcagcgcctggaaggcgatgttcgcgtcatggcccgacaacacggagttcagctgggccatcacgccgggcacattgcggtggatgtggagcacccgtacgccgtggcgcggaggcgtgttgacttcgggcaggttgacgctcatggaggttgaaccggtgtccatgtattcctgcagcttgttggcgacatagcggccgatgtccacctgtgcttcctgggtggaaccaccgacgtgcggggtgaggatcacattggggatcccctgcagcggcgacacgaagcgctcccccgcggacttcggctcggtggggaacacatcaaccgcagcaccggccaggtgcccggacttcaggttctcggccagggcctggtcgtcgaagacaaagccacgggacaggttgaggaacaaggagcggggacgcatcgccgcgaactggtcggctccgaagaacccggcgttcgacttgcgcccgtcgacgtgcagggtgacggtctcggccttgctcagcagttcgtcgaggctgtcgcaccgctgcgcgttgcccatggccagccgatcctggatgtcgtagaagtagacgcgcataccgaaggcctcggcgagcacggacagctgggagccgatgttgccgtagccgacgatgcccaggcggcgtccacggacctcgtgcgaaccggtggcggacttgctccagatgccctcatgcatctgggcgttgcgatcggtgaggtggcgcgccatcgcgacgatctcggccatggccagctcgaccactgagcgggtattggaatagggcgcgttgaacaccgccacgcccttggtggcgcactgcggtagggcaatctggttcgtgccgatgcagaaggcaccgatcacattgaggccggcggggatcctgcgcagcacattgtccgtcacgtgggtgcgggatcggatgcccagcaggttcaccccgtccagagccgagaccagctcttcctcactcagggcaccggcgcgtgtctcgacgtcataaccggcggcggtgaggatgcgggtggcttcggggtggatgttctcgagcaggagtgccttcacgcggcaatagtagggggccgcacccaatcctcaaggccccatctcagtaggcgtcggatgtcaggatccgcgcggacccgtggcacgcaatcgcgggatgctcgccagcagggtgcgggtgtattcctgcgagggatgttcgtacacctgttcgatgtttccgtgctccacgatgcggcctgatttcatgaccacgaccgagtcgcagacatgtcggaccacctcgaggtcgtggctgacgaacagcaaggtgagctcgtggcggctgaccaggtcggcgaacaggttgagcacatgggcccgcaccgacacgtccaatgccgacaccgcctcgtcggcgatgagcacatcgggactcggggcaatggcacgggcgatcgcgatgcgctgtcgctggcccccactgaactcgtggggatagtgctcggccgcgtcggcctccagctgaacctgttcgagcacctcggcaagtcgcgcacgatggtcgcgcggcacatcgggacgcccccgcaacaggcgggaacgcaggggctcagtgatgatctggcccaccttcatgcgggggtccagggaactgcgtgggtcctggaagaccatctgcacgctcgacctgagctcgccgagctgacgctccctggcgccgtcgatgcgttgcccgcgaaacctgatctcccctgagctgggcgcgatgatcgcgtcgagcatccgcaccaacgtcgacttccccgaaccggactcccccacgatgcccaaccgctggccggccatcacgtcgaggtcgatcccgtcaacggcctgcacgtgtcggtagccgctgcgcgcaccctgctcaaagcccttgcgcaggccgcggacgcggaattccggagttgcaggggcgtcactcatggtggttccatccatcgtcggggttccagaagtcctcgatctcgggcagccgctgccccggtggcaccgcgctgatggcggcggtggcgatcaggcccctggtgtaggggtgctggggattgccgagcacctgcgccagcggtcctgcctcgaccagctcaccgcgatacatcacgatcaggtcgtcgcacacctgggagacgacggccaggtcatggctgatgaacaggcaggcggcattcacggcacgcagttcggcgttgagcacctccaggacgcgagcctgcacagtgacgtcgagggccgtggtcggctcgtcgcagatcaccaggcgcggtcggttgatcagcgccatggcggtcaggctgcgttggcgttgccctccggacaattggtgggggaaactgtccgccacgcgacgggggtcaggcagcccgacctcgccgagcatctcaagcacccgttcgcgagccttgccggtcggggccccgccgtgcaggcgcagggcctcggccacctggcgtcccacgcgcatggtcgggtcgagcgcggtcatcggttcctggaagatcatcgacatcgcgtcgccccgcagcttggtgtattcgccgtccgacatcccgacgagctcggtgccctcccagcggatggaacccccgacatgggcggtctccggcagcagtcccatcagggccagggcggtgaccgatttgcccgagcccgactcaccgatgaggccgagccgttgtccggcccgcaggtcgaagtcgataccacgcagggccggggcacgacggcgtccgaagtcgaccctcaggtcacgcaccgccagcaggggttcgccagccatctcaggagtcctccctcaggcgggggtcgatgatctcgcgaaggccatccccggtcaggttgaacccgagcacggcaatcgcgatgaacaatgccggccacagtacctgcagccaatcggcgtacatgtacggctgggcgtcgtacagcatgcgtccccaggtcggcgtggtgggcggtgtgcccagccccaggtagctcagtgcggcttcggcgagcacggccatgcccaggctcgacgaggactggacgaggaccacgggggcgatattgggcagcacatgtgacctggcgacctcgacccagccgatgcccgatgaccgcgatgcggcgatgtagtcgtggctcatcaccccgcgggtggcggagttcgcgacgcgcgcgaaggcgggaacggccgcgatgccaatggcgctcatcgcggtgagcgtggtgcccgagccgttcgcagccgccaacaggatggccagaaggatcgcggggaaggcgtacaggatgtcactgccctgcatgatgcgccgccccaccttgggacgactcatgcccgaccagatgcccaccggtacgcccacgatcgccccgatggccaccgagacgacgccgaccagcaggcaactgcgggcgccgaccatgaggcgcgccaggatgtcgcggccgtagccatcggtgcccaggaggtggtcaccgccggctcgcagcaaggcctgccgggcctggaccttgaccggatcgtcgggcagccagaacagtccgacgagcgcgaacaccaccacgaccgtgagcaggccgacacccaccaccaggctcgcgcgcctcacagcgtgcgctcctggtcgggatcgcgcaggcgtggatcaagcaggcggtaggccaggtcggccagtccgttgatcaccaacaccaatgccacctgcaacatgacgatgccctgcaccaccggcaggtcgcgttggttgaccgtgctcaccagcagggaccccatgcccggcagcacgaagacgttctccaccacgatgccgccggcgaacaaggaggccagctcgaggcccagcaccgtgatcacctgcagcgccgcattgcgcagtccgtggcgcgcgaccgctgcgcggaagggccatccgatggagcgcgcggtgcggaaatagtcctcgttgagcacgtcgatgaaggcggaccgcacatagcgccccaggacggctgactggacgatcgccagggagacgacgggcagcaccatgtggcgcgcccattccaccgggtccgccgtcagcttcgtgtagccattggccggcagccagtgcagcttcaccgcgaacaacaccgacagcagcagtcccgcgaggaaagccggaacggccatcccgacctgcgacatcccggcaaccaggagtccgtcgagatggcgccgtcgcagggcggagatcaccccgaccgggatggcgatcacgatcgacagggtcatccccagcagcacgagccaaccggtcacggccagcttgggggcgatcatggccgcgacgctcaccccggacagggcggacgtgcccaggttgcccgtgaccagcccacccatccattccaggtagcgcagcggccagggccggtccagccccagccgcccccgcagctcggcaatcgactgggcgtccgcgttggtccccagaatggtgcccgccacatcaccgggcagcaggttgaccaacatgaagatgatcagcgaggcaaccaggagcgccaccacataggtgacgacctggcggccgatcatgcgcgctacacgcacagagcctcagaagttcttcgatgagatcgacgtgatgtcgaagctgctggacgtcaggttcttgggcactccctcaagatcggcccgcgtcaccacgaggttcgccaacagatagaggaaatcggcgacggcgtcggtggccaggatcctggccgcctgcttcatgaggcccacctgttcgtcggacggaccggtttccgcctcggcgatgagcttctggaagtccggattgttgtagtgccagtagtagcccggctcggcccacttgatgatgtcgcgaccctcggcatgcccaacgatcgtgaggtcgtagttgctcttggtcatcacctcgtcgatccatcgggtgaagtcgagctggtcgacattgacggtgattccgacatccttcagggcgctggccacgaaggtcgccgaggccgtcgcatagggcagcgtgggcacgcgcagcgccaacgtcaggttgttctcgtggccggcgtccttcagcagctggcgggccttgtcggggtcgtagccataggtgttggacaagtcctcgtaccaggggtcggtgggagggaccatcgaaccgatcagcgtgccgtggccggcggccaccgtcttcaacaggtcgccacggttgatcgcatagttgatcgcctggcgcacccggatgtcctggaaggcatccttctggtggttgaagcccatcaccacctcggagttggtggtgccgtccaggatcgtgtatttgctcgtgtcgttgaactggctcagcgcctggggggcctgcacattcgagatgatgtccaggtccccgctgctcatcgcggcattctccgcgttcgggtcggtgaagctcttgaacgtcacctcgtcgaacttcgtgggggtgccccaatatgacccggcccgcttgagggtgaccaactcgttctggtgccactccttcatctcgaagggacccgaaccggccggctgcttgtcgatgtcgttgatcttggtggggtcgtagacgatgccggccgcctgggccatgtagtagagccagttgttcgaccgctgcgacagcaccacctccaccgtcgtggggtccttgacgttgacggcggccatcggggcaatctgctgcttgatggccgaggtgatcttgggctcggtcatcacccggtcgaaggaggtcttgacggcgttggcatcgactgcggcgccgctggcgaactttgcctggggctgcaggttgaaggtgtaggtgagcccatcatcggactgttcccatttcgtggccagcagcggcttgatatcgccgttgttgtcgagcttcacgagcgtctcgtagacgttgtagagcagcgcctgcggaatggcggcggcgctgttggtcgacggatccagtgcattgggagccaccgacgtgccgatcaccagattgtgggcctggctggaggctccactgccgctacccgaggtggaacagcccacgagtgttgccatcgacccggcgagaactgccccgatgaggggacgacggccaaccctgaatcccatgtgtcttctcctagtggatcggcccgccccacggtgggacaggctgtgcgaaagacggcatgaatgctaccgcctgtgcgtactcggcgcgccgagcagggcccggtggcagaagtgccgcggccgcaccctcccggcatccctgcgggcccgggaaggaagcgcccatttggttttcctgacgcttgtctgtaatgttgaacaggcgacgcggggtggagcagctcggtagctcgctgggctcataacccagaggtcacaggttcaaatcctgtccccgctacgaataatggtcctggtcataattgaccaggaccattttgcatgtcccggacatcctccgtgccggtgtcccagtcgtgccggtgtcccagcactcatcgactcacacgttcggcacccgggcggttccggccccgcgcaaccggatcgggaccccgtccctgtccaacctctcatgggattgcgccgcgcgcagtccgtccagttcctcttccactgcctggcgggcccgctcgtggttgccccggccgaagcagatcccgccgtccccatcgccggcgtcgacgatgtggaagcccgcgtcgcgaatcatcgacaggtcgtcattgccggtctgcccctcgctggtcaggtagtcacccaggaagatggaattgcacacctccagcaccaacggctgcagggtgcgaatgtggtattcccgtccggccgccgagcggagctcactgtcggggtggatcaggcgcatcatcgacaggatgcgcaggcaccgctccggggtgagctcccggtgggaatgcagcggcgtgccctcgaaggggagcaggaagttcaccggcaccgactcggcgccgagctcccgcagtgcgaaggccacctccacgagctcctcgtcggtctcccccatccccgcaatgaggccggagcaggcgctgatgccggcccgctgggcggtctgcaccgtgttgacccgatcggcatagctgtgggtggagcagatgtcggagtagtgctcctcggctgtgttgaggttgtggttgtagcgatcagacccggccgcggccagctgttcggccttgtcgtcatcgaggaagcccaggcaggtgcagatgtgcagccccggatgttcggcgtggatgcgggcgacaatgcccgccaccttggccacctcgcgacgtgatggccccctccccgaggcgaccaggcagacggtggagacaccgtgcgacacacccatctcgaccgcctcgtgcacctggtcatcggtgagccaggtgtagcgcaggatgtcggcatccgaacccaacgactgggaacaataggagcagttctccgggcacaggcccgacttcaggctgaccaggtaattgagccgcacgccacggccgaagaagcgacgacgtaccttcccggcagcggcgacgatcgacagcgtctcggcgtcatcggccgccaacacctccagtgcctcgtcgcgggtgatcgacgtcccacgcatggcggtggcggtcatctgttccagatccattggacttcctcatctcatgggcgcatgcgcccgcgatgagggccacggagcaccgtgggcccgtggaatgaccctcttcgcgcattcgcgagaagcctacaatgaatcacttaacactgttcaatgaagtccgggaacaagacgcccgccacctgccgggtgctacttcacgtagcccgcgaactccgggtgcttgtcgatccagccgcggacgaaccagcaggccgggatcatcgacaggcccttgtccgccgcctcacgcaccgcccgggacgcgagctgcgcgccgatcccccgcccgccgaactgcggatgcacctcggtgtgcgggaacaggacggtgccctcgcccagctggtattcaaggatccccgccagctcgccgtccacccgggcctcgtagcgaccctgggcctcgttgttggtgatcgtcacactcgtgtcatcactcatgatggtgtctccccctcagtcggcgcacccacggtgggtggccccttcgaatcggcggacccacccatggtggatgggttcgtcaaacgcaacgacgttgtctgtgcaacacccgggcgggcctgcggattccggaccggtcggagcgcaccgggcaggcgtcggcactcacctggcgatctcgcccctggcgagcctgatgagtcgatcaagtaccgccccgccggaggcatttgagccgttgtgctcatactggctggtcgcccaggggtgcatcgtgggaatcagggccgccgtttgcatcgagaactcgaagggcacataggcatcattcacgtagatcgctgcggcgcacggggcctccacggcctgcagcgcccgcgcgtcgtacagtcgcggccaggcccggtcggcgatgatgcccgcacactcacgccaggggcgcagcgacgaatcctcgtcgaaccactcgggaaagacgtgttcaccggtcaacaggctggtgtcctggcggaactgatcgggcaggacgcgagccgccgaccagccggtgacgcccccgtccgcgaatgacgactcgtggatcaccgtatagagaggattgcgtcccccgaagctcagtgcgtcggccaggtcgtagcggaagacccgagatcccggatcgttctccagcaggtagtgcaaccgctcggcgccccctgaggctccgagcaggtggcccagggagcggatccgtgagggccccacgacatcgccgttgggcgtgtggatggcctcctgctcggccagtccgaccagccggcgcatgcggtcccgatcggaggggaaacgttggtagaacgcccgggacttcgcggcgagctcgcggtaggtggctgtgtacacgtcgtcggcggaacgacccaccggcggtagcccaccggtgaaataggcggccgagatcgcatcgggatgggtcgacagatagtgcagtgccgtgaacccgccgaaggactggccgagcaccgcccaggactcgacgcccaactcctcgcgcaggtcctcgcaatcggcgacgatctcatcggcccgcatgtggctcaggtactccgcctggtcctgcggggcaccgatgggctcgctcaccggatcggacaaccccgtgccgcgctggtcgaggaagaccagctggtagtcctccagagcccggggcaaccaggccggggtgggtggatcgaggcttggccggggggactcatggccgggcccgccctgcaggaacagcagatagggccggccggtgcccccgggtagtgccacgacgcgggcgaagatcgacagccgtcgtccgtcgagcacgttgatgtggtccagtggcacgtcgacgcgaatcgaacgggtcatcaagccggggatactgtgctgccatgtcatgccccaaggctaggggccggaccgcgcccacgacagggccccggagaaataggcgcgtcccgacgcgtcaccggcgacctgccacgaacttgtcgcactcatagactgactagcgtgtcgcccattgagcttgattaccgcctgtcacgtcacacccttgacaacggcatgcacgtggtcatcaaccacgaccccactgcgccgggagaggcgctgaacatctggtaccgcgtcggatcagccgatgaacaacccggcgccaccggtttcgcccacctgttcgagcacctcatgttcaccggatccgcgcaggtggccgccagtgagcacctgtcactgctcgagtcgatcggcggctcggcgaatgccacgacgtcattcgaccgcaccaactacttcgagacggtgcccccgggtgcacttgacctggcgttgtggctggagggcgatcggctgggcagtctcaccatcagcgatgagagcttcgccacccagcgtgaggtggtcaaggaggagaagcgccagcgctacgacaacgtgccctacggcgacctgcaggacctgatgatcgagttgaacttcccgcaggaccatccctacgggcacctgccgatcggatccatggccgaccttgacgcagccacccccgatcaggcacgcgccttcttcgcacgcttctaccgacccaacaacgccttcctcacgctgagcgggccggtcgacccgcagcaggccctggcctcggtccgccgttacctgggggacctggacccgggtccggtggatcgtcaaccctcccgcgggctgccgcgccatgagggcgtcccgacgctggaggtgacgcgccccgcgcccagctcgatggtgcacctgtgctggcggacgccggcctatgccgagcgtgaccacctggtggttgagcaggcgttggcggtgttggcatccggtcagtcgagcaggctgcccgacctgctggtgcgccagacgcagatcgccgattcggtgggcgccggtgacttcagcctgtcgcgcggtgtctccctggcggtgctctcggcgcgcgtggctccggagcacagcaccgaggaggtctccgaggccctggtcagcgaagtcgcccgactgtgcgacgagggacccgaccaggccgagatcgaccgcatcaatgcgggcttcgaccgatcgtggctcagccgtctggcgagcgtggacgaacgggccgacgagatcagctcgatgggctgcctgcttgacgatcccggccagatcaacaccctgctgggaaccatccatgcgatcacggccgaagacatcaccgccgcggcacgccactggttggctcccgagcaccggtcggtgctcatctacaacgcacaggaggctcgatgagctaccaccagatctcccgacccgaactcggtatccggcgggaatggcagttccccctgccccaggtgcgcaccctcgacaacgggatgacgatctgggcctaccagctccccggtcagtacgtgttgagcatggaactcgtcttcgatgtcgccctgagcgatgaaccgaccgggcacgagggcgtcgccacgctcgccctgcgttgttccgacgagggcacggtggcccaccctggcaatgcactggccgagcgcattgagtcgatcggcgccgaatacgacggcggtgcggcccgttgggccacgcgctgtggcattgacgtggcggcaccctacgcggatcaggccgtcgacctgctgtcggagatcgtgcgcatccccgcctatgaggaacgcgacgtcgaacgccatcgcaccctggcgctcaccgagatcgagcagatgcgcgccagctcgggctccatggcctcggtgggcatgcgacaggccctgtggacggccggcacccggcatgccctgccgagcaccggaacggcgcagagcatcgccggcctggacgcgacacaggtccgggccttccatgaccggtggtggcgccctgacggaagcacgctgatcctggccggtgacctacccgacggactcgtggaccgggccgcggaggtcttctcgcagtggccgtccatcggctcgcgcacccacgccggagcaccacgggcccgcgccggcggagccccggtacgcctcatcgatcgtccgggctcggtggccgccgatgtgagcttcggactggtcggccccgcacacgatgacccccagtggtccgccctgcaggtggccaccgaagccgtcggcggggccttcggcagccggctcaacctgagcctgcgtgaacggctcggatacacctacggtgtgtcggcatcgctgtcggccagccgcttcaacagcgccttcgggtcgtcggcgagcatccgcaacgaggtggtcgccgcagcctgtcgcgaggccctcgaccagttggacctggacggccatccgctccgcgacgaggaggtcagttctgccatcgactccctcatcgcgatcgccccgctgcgttacgacaccgccggtgcgatcgtcgggcaggcgggggccctggcggctcgcgggttctcccctgattggatcaatcaggtcaatcgcggtatcgcggccaccaccaccgaccaggccaacgaggccttcgatgcgctcgtctcgcggtcagtccgtgagcacaccctgcgcatggtgatctgcggtgatgccgggcagctggtcggcccgctggaggccgatggcttccgggtggagccgttcgccccgatcctgtgaccgaccgcgggccgcgcccgcacgtgaaatcccccggcagcgttggctaccgggggatttcacgttgatgcgatgctggcggatcagccgccggcggccgccatggcctcgctcaccttggcctgggcaacctgcatctgggactggtaggtagccaggtcccccgccttgagcgccttgtcggccgaggagaaggcgtcattggccgcctggagattcgccttcacggcctcctcaccggtggccgggacctgctgggttgccccggcctgcccgggctgggcgttctcaccggtgcttgctccggcatttccaccgaagacggtgtccagcgcctcctgcagcgttgtcccgataccgatgtgggtcccgtagcgggccacgacgaagcgcaacaccgggtagctgccggccgaggaatccttgcgctgggtgtagatcggctcgatgtagatcagtccatcaccgagcggcagcgtcagcaggtttccgtacaacgcgtcggcagaaccactgccgccctgtcccacgaagggcagcaggtggtcggcaacggactggtcggaggaaatggcgttgtaggtctggttcggccccggaacctgctgggtgtccgacagcctcagcacgcggatcttgccgtaatcaggattggacgtgtcggcgaccaccgacatgtaggcgcccatgttctcgcgcttgttgggcacatagacagcggtctggctgaacaccggggccgcatcccccggccacttaatggacaggtagtagggaggttcggccttgccgctcttgtcacgcggatcggccggcaccacccacaggtccgactggttgtaccagttgcccggatcggtcatgtggtagcgcccgaggatctggcgctgcaccttgaacaggtcctgcggatagcgcaggtgcgacaacagctcgggcgatgcctggctcttgtccgtcagcactcccgggaaggccttctcccaggtcttcaggatcgggtcggaggtgtcccacgcgtacagcttcacgctgccgtcataggcgtcgaccactgccttcaccgagttgcgcacgtagttgacctgcttggtgtcggtgccctggcgccagctgctcgccgagtccgagatggtgtcctgcatgttgatgtgctggctgttcgggtagttggcggtgctggtgtaagcgtccgcgatccacacgatgcgcccgtccacgacggccgggtacgggtcctggtcgaccgtcagccagggagccacggccttgacccgctcctggggcgtgcggttgtacaggatctgcgagttctggttcaccctgcccgacagcagcaggttcatgtcgccgaacttcgtcgcgtacatggcacgcgtgatgggattgccgatcggcacgccaccggtcccggtgtaggtggagtgctgctcgccaccggcggtgttgccgcccggggtgtccagctccaccggatcggcgccctcgacgtttccggcaatcacatactggttctgcttctcaccgaagtagatgcgtggctgttgctcgttgagcttgccctggggaggaatgtcccactcgatccactccggttcgccgttggcctgggcacgtgatccgtaggaggccaccatgccgaagccgtgggtgtagaccgtgtggatgttgttccagctctggtcgggcaggccgttgatgtcaatctcgcgcgccgcgacgacggtgtcggtcttcttgccgtcgatctcatagcgatcaacgtcgagcacattggggaaggtgtagaagccgcgcacctgctgcagttgctcgaaggtcggcgcgatgatcgccgggtccatcaggcgaatggccggcagcgcctcggcatcagacttgagctggccctggctgacgtcggtcttcgccgaatagtccgtgatggacacatcgtcgatgtcgtaggcctgccgggtggcggcgatctggttctggatataggggcgctcacggtcgggctcgctcgggcgcacgtcgaagcgttggatgaccgccggatagatgccctggatgagcaggctcgacacgaccatgaggatgatcgccgtgccggggacgcgccacgcgcgcagcctggcgttggcgaagaacattgcggcgcagatgaaggcgatgatcgccacgatcagccgtgcagtgatccgtgcgtggtcatcggtgtagccgatgccagtgaacagggtgtcattgtcggagatggcgaattcatagcgcgcgaagagctgttgcactccgtagacgaccagaatcagaccaaacatgatcgacaggtgcacctgcgctgccatcccgaagggattgtgcacctccacgcggggcggctcgccgcccggcgtgcccggcaggggaccacggaagcgcacgggtgaggcgtgcagcgacccggtgatcaggtgcacgatcgccgcgacgatcgtgcccacgatcaacgtggcgagcaccatgccgagcacgaactgcaggaaggggagggtgaacgtgtagaacgagacgtccttgttgaaataggcgtcacgctggccgaacggcgtgcggttgatgaacagcaggacgtcgtccacgtgcgtggtggcgacggcgcccgcgatgacgccgatcacgatcgagggaagggcgatcaccagccgggtgcgccgtgccagcgcctgccggtagtggtcgagcacatcggattccagcggcgccggcttgtcgggccgtcgtcgccaggcgatcgccatggtgaccgcgcagaccacggccatcagcaccgcgctggccaggaacagggccaccgcggtgatcatccgcgtggtgaagacctgctggaaggacagccgacggaaccacagccagtcggtcacgacctcggtgaccagccaccacgcggcaatgatcgccaccagcaccacgagtgtgatgccaagggcgctcctgcggcgcgtggacttctgctgtgggttgcgcgccctattggccgcggacctgtgtgagcgattcacgattcctcgttctccccccagtggaaggttcgtgccaatgcgctggtcagcgccggaacaagattgtccccggcaagtaagtcatccggcttgctcgccaaccgtgccacaccgtagtgggtgccgtcacgcatgacgccaacgaccacccggatctcctcgtggcgggggtgcgttgcgacgaattcggcggccttgtcaggatcatcgggaatctggtcctccacgtccgcgggcaggaaggtgcgctcggtggtgatcgcggcccccgcaacggtgtcgggccacccgatcgtggccagcccctcgagcaggtcggagccgggatggaagtcatcctgttcgaccgaggagagctggtcagcggtgttgaccaccagctggtctcccagtgccggctcggcggcaagcagttcagcggtgggaaccagggcgaacaatcgagagggttggtcccacccggaacgtgccacgaagcgctcgatctccaccagtgcggcgctcagcctgtccagcgcatcgtgctggtcatcgcgggcctcggcccgctcctcaccgtcggacaactcgcccgccgcatcacgtggttggttcatcctcgtcctgttcgttggttgtgctgtgtcgacattgctgtcgcatcgcttctgtctggttgctgccgggggcccgacgcggcggatctggggtgccgtcacggctgcgggcttcgtatcaacagcgcggcacgccgttcatatcgccccgggccagcgactcgagtgaggtgatggcatcgtcgagcttgttcaccttcaccaggtcgaggctggtcttcacctgctgggtttccgaacagttcccggccgggacgaggaagacagtggccccaccccgctcggcgctgcgcagcttctcctcaaccccggaagtggcccccacggtgcccgagggatcgatcgtgccggttgccgcgatcgtgcggccctgggcgaggtcggtgggtgagacgagctcgtacaccgccagtgccagcaccaggccgtcgcgcggctggtcgatgtcggggtcgatcgtgaactgcacctgagggagatattggtatccgtcgcgcagggtcatgcccgcgcgcggcacgctgcggtccgaggcgctggcctgggtggtcacctgcaccttcatgaccgctccattgcgggtgatcccgaattcgatggtgtcgccgatgctgacgtccttgatgatgttggtcacatcggaggcagccgagacgatcttgccgttgacggtgtcgatgacgtcgccggcctgcagcagttcgtaggcgggtcccccgctggacaccgaatcgatcaccgcattctcctgcaccggtatgtgggcggcacgcagcgcagcaaccgtcgcattgcgctgcgaggtgtccatctcgtcggcggattgctgggtcagctcagaggcactcatccccaccgggtagatccagtcgcggggcatcacattgtggaagggcagcaggtaattggccagggcctcgggcagggtgagatgtgagtcggacttggtggcggccacggtggacaacagcagctgaccatcggtggggctcgtctcggcaccgctgacctgcacggccggctcgccgccctgcgcatccaaaaggttgtaggtgaccccgggactccaggccacgaagggaatcgggatcagggtgacggcgcctgccaacaacacgaagcacagtgctgcgacgatcgccgtgcgggtgttacgggtcatgcggacatcacggcaccatcgccggttgtgcccctgggacctgacatggcgatgagtttagctgagcggggagcgtcgatgcgtgaccaatttccccgcacggggcgattccggatgaatcccccgccatggtcgggttgatcccggccgtgtgtaacgggcttgggtgggtgcgcttgaatggggacaagagcagcgggagtgcccgcgggcgcgctgcgcacgatcgaggagcctgtcatgagtgatgagaacacgatgcgacccggcgatgacgatcccggccaggatccgctcagcgaattgctgcggcgcatgggactgaatgtgcccgcgcaggggctggacctcaacgccatgatgggccagttccaacaggccatgtcgcaggccgcggcgcatactgattcatcaacgggcatcgactgggatgcgaccaagcaggcggcacgccacgtggtcgcatcgctggggcccgatccgagtcccacccagacgcagagggcacagctggccgacgccgaccggctggccgaatcgtggcttgatccggtgacgacctttgccccagccgacgccccggcggaaccctggagcagggcgcagtgggtcgacgacaccatggattcctggcgagcgatcgttgagccgatcgtgacggcgatcgccgacgcgatgtcgaaggcgatgggcggtcaggcgatggccgatgcccccgagctggcccagttgtcgggcatgctcggcccgatccttcgtggcgcggccgggcagatgtatgccgcccagctgtccgaggcgatcggcaaggtcgcggccgatgtgctcaccggtgccgagttgggcgtccaactgctgagcaagccccgcgtggtggtgctgcccaccaacgccaatgccttcgtgcgtggccttgagctgcccgacgaggacgtgctcatgtacctgacgctgcgcgaggccgcccgtcagcgcctgttcgcccgcgtcacgtggctcggcccgcagctcctggcgttgatcgagcactatgcgcgcggcatcacgattgacatggcggcactgggcgaggtgatcgatcccgattcgatggccgggctgacccccgacaagttgcaggagttgtccaagcagctccagggacgcctgttcacccccacccgcactccggagcaggaggaggtgctgggacggctggagacgctcctggcactggttgagggctgggtcgacacggtcgcccatgaggctgccgcgagctggctcagccacgaggaagcactcatggaggtcatccgccgacgccgggcaaccggcgggccgacggagaagatgttcggctccctggtcggcttggaactgcgtccgcgccgggtgcgcgatgcccagcggctgtggcaggccgtgcaggcggcccgcggccccgagggtcgcgacgcggtgtgggcccaccctgacctgattcccacgacagccgacctggacgatccgatcgggttcagcagcggggagcgcgacgaggaccagacccgcgactgggatgacgatctggcccgcctgctcgagcaggacaggcatgacgacggcccggctgatccggattcccggggaagcggcgatacgccgggcccgaccgaccactaggccagaactcgccaccgggtgcgcccggggttcagtctccggatgtctgcgacatctcggaggcgctccacccctcgaggaagccacgtgcccgctcagcccgctcgtagtgcgccaggagctcatggaacgccgacgagtggtccgggtgcagcaggtgcacgagctcgtggagcagcacatagtcgatcacccacgttggcatcgcccgtaaccggtccgacagccggatggtgccgtcggccggggtgcaggatccccaccgggagcgctgattggagacccaccgcaccgagctcgggcgggcacggccctgcaggtaacgcaccgacagggtgtcggcacggcgcgccaggtcgtcgtcaccggcaagcggaccacgcgacggtgtccgggcggccaccttcgtcaccatctgcgcgacccagtgctcctgctcggcatggttcatgcgggccgggagcatcacgacgatgcgatcaccctctcgccgggctgccacggtccggcgccggcgttcgctacgacgcaccaccacctggtggacgccctcgggcagctccacgccggccggcggcggtaccaccatgtctgcgcggcacccggtgccatggacggactgggtgccatgggcggactgggtgccatgggcagcgggcacggccttgctgggatgcaccgctcaagagtagccacgcccggcgcaccaactccatggcctgccggctcgacaccacgtcgagccgtggcacgcaccggggccccacccggggaccaactgccggctgacaaggcgcgcagggcaggttgacgatcgtcgcaccacaccgttagattgttggtgaagcccccggtttcagccatatgcaggggaaggcatttggcggatccgggggtttcctctgtcctgggggcgtgtggcccgggtgtcaacgcggacgacgcataccgcgttcccgaaccgttatcagccgacctgatcggcccgccgggggccttccccgggtgccgtgaacccgatccgcttcccccgtgtgactagagttgtgctgaacgcaggcctcaatgttcctcggagcatgacggccccagtcaactttttgggaggaacaactgtggcagaagagacttatgaaggtgagttctactgtgtgaagtgcaaggccaagcgtgaggccaagggcaatgtcgtggtgaacgccaagggcacccgcatggccaaggccaagtgcccggtgtgtggcaccaacctgaaccgaatcctcggcaaggcctgattcacacttccctacttcgaacgggcctcccggcatcaagatgccgggaggcccgttctcttgttccccgtgtggtccggggatcgtgcgggcccgcatggcggttgtgcggtcggcatgcggtgttgtcccgggcccggctgaggtcggcatgcggtgttgtcccggaccggcatcgtgtcgtcccgacacccgtcggtgtggtccgttcccgccacatggctgatcggccctcccccggctgccatagtccatgccatgacccccgcacccgaccgtcggaccgctccaccgccccgtcaggactcggctcccacactgcgactcgtcaccgcccccgtcgcaccgccgcctcccgccgggctgcgactggtgggctgccgggtggaggagctggccggcgatcactacgtgctggtgggcgacgccgacgcggccgtcgagctgcgggggcccggagcagtcgtcctggcaggggcggtcagcacactggccggcaccggcgatatgtcggcagcgcgagcagggctctccgccgacgacgatcgagccttccgggcgctgttggacgagctgcgagctcacggcctggcaaccgtggacccctgtgggcccggtcggggcatccgcgtgggcctggtcggggaaggaccacttgccaaggcattgacgcccgtcgtggccgccctgggtgacctcacactgttcggtgagtgcctgccacccgttgccagcaggcagccgctcagcacccgtcggaagcgggccaaggagccgcgacccctccactggacgcagtccggtgagcagggactggatctcgtgatcatcgccaccacgcgacgtgaacccgatccggcgttgggctggctgctcgcacgggccgccaccccgcacctgtcggtcaccgcgcaccggggacagaccatcgtctcgggcatctctgtcccgggggtgaccgcctgcatgctctgcgccgggtcagcgggcggctcgaggccgctgaaggcctggcgggcggcggcacccgccgaaccggacgactccgacctcgcgtgggccgccagtcaggtccgccgggcggtcgacaccttccgcaccacccgcacgatctggccgacgctgcactccgacggtgctgtcgagcagccccacatgcccgatcccgagtgcccggcctgcggggcgatggctgccgctcaccgccggcggcgccgtgacggaacgccagtcatggccccggggtcgtcgtcctgccggagcacgcgcacagcggccgcctgacgggtcgacctccacgaagtgcggaggctccgcgctggttcagtcgccggattcactcacgatgcggacggcgcatccgaggtggcatcggcgccgacgatctctgcgcccgccccgtcaatgatccgcagcaattgcgccccatagcggcgcagcttggcggttcccagtccacggatcttcatcagcgattcgtcgtcacggggctggtactgggcgatcgccatgagcgtcgtatcggtgaacacgacgtaggccggcagcgaatgctgcttcgactcggccaggcgccacgccttcagtcgggcgagcaggtcctcgtcgtaatcgacctcacacccctcgtggtggcccaacttcacctcgaccgcattggtcatcggtcgacggcagacgatgcaccgggcaaccctcttggtccggggcccacgtgccgctcggggatccaccgtgggcgatcccgtcgactcgcccagcagtccacccaggaagcgcgaggggttccggcgcccccgtccattcggtccggaggtcgcccaactgatccgcagggcctgacgtgcgcgggtgatgcccacatagaacaacctgcgctcctcggcgacctgggccggcgtcttggccagggagaagggcaggagcccctcctgcacgcccaccagggccacggcctcccattcgagtcccttggccgaatgcagcgttgacagcgtcactccctcaccgaccggtgcatgctgcatggaggcgcgctcggcgatctgggcgaccagccgatcgaggccgtcggcgccgtcggacacgagttgctggcccatctcgcgcagggcaccccacgattcccagcgttcgcgtacccgaccctgcccttcgggtgcctgcggcgtccatcccagtcccgtcagcacctcatcgagggattcgccgggatctgcctgcgggtcggaatgcgccacattggtcaggcgtcccagcgccgtgcgcacctcggcgcgttcgaagaagcgctccgaaccccgcacgtggtagggaatgtgttcgccgtccagggctgactcaagggcaggcgattgggccgacacccggaacaacaccgccatgtccgaccaggcgatgcctgcccgatgccgcgcggcaagccaacccgccaggtgctccgcctccgcgacagggtcctgggccgcggcgaggtccaccggacgccccgcatccaggaccggcctgaggatcactccgcgtcccacggcgggccggcccggcggatgcaggagttcattggcggccttcaggatctgcggcgttgaacgatagttggcattcaggtggagcacgtgcgcatccgggaattcgcgcgagaagttcgtcaggaaacgcgcatcggcaccggcgaacgagtgaatggcctgatccggatcgcccaccacgcacagatcgtcacaatcccccagccattgcaggagaaggctgtgctgcagcggactgacgtcctggtactcgtcgacgacaaagtgccgatagaccgagcggaactcctgggccacctccggatgctcgtgcatgagggacaccgcacacagcaggatgtcgtcatagtccatcacctggcgttcggccttgacccgctcatagtcggcggccaccttggccacggttgcgggggtcacaccggagacctggtgtccggcgcgctcggccattgcggcgtactcggccggcaggacgttggtggacttggcccaggagatctcactgctgagatcacggatcacggccgtatcggtgcgtacatggtgacgcctggcggcctcggccaccagaccgaatgtcgagccagcgatctccggcaactcccggccggtcgccctcggccagaaatagcggatctggcgcagcgcggccgagtggaaggtgcgcgcctggacccggggcacccccagcgccgccaaccgggcccgcatctcccccgcagcgcgcgtcgtgaaggtcacggcgagaatcgaatcgggtgcctgggcgccgctcagcaccgcatgggcgatccggtgggtgatggcgcgcgtcttgcccgtgccggcccccgcgagcaccgcaagcggcccggccacatcaaccgcgacggcccgctggtccttgtccaatccggacaacaccgattcgtcggtcatcgggggcggggaattgcgcgcgggatcactcatcacgcctgccaccataggcggggcctgtgacacttccgatctgcgtgtccaccaggtacattccggatccccatcgcggcaatgtcgtccccacggcgcagggctgaggggccggccgtgtcggtggcaggccctacagtggcgtgcatggcgttgctcgacccctcacccgcggcgatccgcatggtgcgctgccccgactgggcctcggtgtgcgccggcgtcgacgcctatctcgattccttcgtgcacgaccccttcgtgctgcccaccgtggtggtgccgggagcagcacacaggcgtgccctgtcacagcacctcgcctcacgccccaccgacccgcagcacaagatccgggcagggatcgacatggtgaccctgggccaactgcgccgtcgttgtgaacaggcgtgcctgggagttgaccccgacgatgatccgtggcgccttccggcaatgaccatgcacatcgcccagctggcgcaggcccacctggattccggggaggattccgcgaccgactggttcgcgctggccaggcattacctccagggcgcctcgggaacggaaactgaccgccccggacgggtcatcgccttcgccgacagcttcgcctccctgatcagcggataccgtcggcaccgacccgatctgctgttggactgggacgagcaccgcgatgtcgatgccctgggccgaccgttgagcgaccaggaccgttggcaggccaacctgtggcgtgagctgacccattcgttacggccgtggatccatccggcagcccgcgaggacaggctccgcgaggcgctcgacgaccctgatccgtccgcacgccagcacctgccctcgcggctcggtgtcgtgggcctggacggattcgtccccgacgaacgccgattcctgacgacgatgtccgcccggattcccctcaccatctggcaattggggtttggatccgatggtccgggtgagtcggccctgcgcgcccggtacgggtcggttcgcgatgagctgtggcaccgcgcacaggcccttcccgatgtccggattgaccgtccggggacaggtccctccggtcgccccgcgacggtcctggcggccctgcaggacgatatccgctccggacacggccccggtgatccacgggctgccgacgaatccctgcagatccacctgtcacacggagttgaccggcaggttgaagtacttcgggagctgttgtgcgatctgttcgacacccaccgggacctgcagccccgtgacgtggcggtggtctgcaccgatatccgccgctatgcaccgctgctggaagccgacttccagcctgctgacacgcccgacgcccacccgggacacgccctgcgggccagggtcgccgggccggcagccgaacagccgaaccaggtgctcgaactcctcgtggggttgttcggcctgccggtgagtcgggccacgggtcaggacttggtcgacctgtgctcgctgccgcccgtggcggcgcgcttcggcttcgacgaggacggcctggcgggcctgcccgaactcctggcccgcgcggaggtgcgttggggggtcgacggctcacaacgggcccggcggggactgtccggcgtgcgccagagcacgtgggtggccggcgttgatcgcctgctggccggcctcgtcatggccgacgagccgcccgcgcggctggacacggtggttcccgtggagcacctcgatgccggtgacgccgacctcatcggcggactggccgagttcgtgtcacgcatgcgcatgcacctccttgagttcgcccagccctgtgggatggcccagtggcgtacccgcattctcgatgccatcgcagatctcaccgacccggacgtggcggagcagtggcaggtcaaccacatcgcccaggagcttgatcgcctcagcgcgggcgcaggcaccgggtccaccgccctgtcggccgccgacatctcagccatgctgcgacgcttgttgcgcccaagcctcgggcgagccgacttcggtaccgggtccctggtgatgtgtggcctgggcgacatccaggcgctggggcaccgggtcatcgtgctgctcggaatcgacgatgagcacttccccccgcgggtcgcccatgatcacgacgacctcctggcgcgccccacggtttcatcgggacgtgtcgatgccgacgcccgggcacgccagcaattcctcgacgcggttctgtccgccggcgagcagctcatcgtcatcgggcggggagctgaccagctcaccggtgagcggctccccctccccgtggtgcttgccgacctgatcggcgctgcccccgtacgcgatgaatcgggcgacgattcgggcgatggcgcccaccgtggctccccctccgacagtgccctcattcgccgacacagcctgcagccccatgacgcgacgaacttcctgggcagcggcaggcatcagccgttcagcttcgaccggcaggccctggccggggcagagtcgctggccgggccccacccgaaggccccggcccgctggtggcaggtgacggcccgggttccggtttccggcgggcccgacccggacgaggcactcgacgtggaccagctcacggccttctaccgcgatccggtgggggcctggttcggtgccaccttcggatttaccccgcggaaccaggaccctgtcctgtcacccgccctgccgctcgccgcggatggattgaccgactatgtggtgggatcgaggatgctggaggcaaccctgtcgggccagccccgtgagcgcatcgattcagctgtcctgctgtccggcgcggttccccccggcacgctcggcgcaacgcaattgatgaatctgtggcccaccgtgcaggcgatggctgcacgcatcggtgacttccgggcgtcctccgagggcgccgcccggcacgccgagatcgaggtggccctgccgcattcgctggtcagcggccagttccagctgttcgacgatcggctgctggaccatcacttcgccaccgtcaaggccaagtacctcgtgccggcctggattcgcctggtggcggccaccgccggtggcctgccggtgcgcgagttcgtcctggtgacacgcgacaaggaggtgcacctggcgcctcccccgcagcaggtcgcgacgcgcatcctgcgccaactcgtggagatgcgtcggcgcgggctgcgcgagttccttcccctgccgctggccaccgcgtggacctatgcgcgggcacagcatgcccacacctcgggcagtgaccggatcaccagcaacgcctaccgacgggaaggacgctattcagcgctgtggggcgactatctcgacctcgactggcgcgcactgacggcacttcccgccgacccggacgaccccatcacagcctccgagtcccgcttcaagaacctggcgcggtggctgatggatcccctcctcgatgccatggcggccgacgaccaggcaggcgcgtggcgatgatcgaccgcatgaatccccgtcccttcgaccccgtggccgccctcccgccgcacacgacggtgcttgaggccggcgccggcacgggcaagacctacaccatcgcggcactcaccgcccaggccctggcccggggacaggtgaccatcgaacgcgtcatgttggtgacctttgcccgggcagccagctatgagctgcgttcgcgggtgcacgaacggctgcggaacaccgccaccgcgatcgacgccacgctggcaggcatcccgcccaccgacccggacgccgtggacgctgacctgtgtgccggggaggccgacgtgctcacggcacgcctcgcgcgtctgcgcgcagcactggcggacttcgaccgcgccaccatcgcgaccacccacgagttctgtgcacggttgctcgaccagctcggaatcctcgttgaccacgaccgcttctcgagcttcctggatgatcccgaccagctccgcgcacaggtcatcgacgatggctacctggcgtggatgtcctcggggcggccgcccctcccgctcctgggggcgcagctcatcggcgagatgtccctgtcacatccggaccttcccctcctggacgctccggcgggcgccagccccgacgcagtcagtcgcgtcgagttcgccaccaacctgcggcgcgagttcgaggcccgcaagcgcagcagctcggtgtacggctaccacgacatggtgcaacgagtactcatggccctgaccgatcccgtcaccggggagctcgccgcgcgcgtcctggcggcacgctacgacctggtgatggttgatgaattccaggacaccagtcccgcccagtggcagatcctcgagcacgccttccacgggcgcacccggctcgtcgtgatcggggacccacgccaggcgatctacgggttccgcggcgccgacctgtacgcataccttgcggccacccggcgtgcggacgactacttcacgttgaaccgcaactatcgctccgacgcaggggtggtgcaggggatcaccgccctgttcgggcaggccaacctggggaccgaggccgcccgtgtggcccttggtgacatgcacgcccagcacgtcgaaccacgcctggccggggcgtcacccaaacaggctgcagtgcagatccgcgccgtggaaccacagtccatgctcaccgcacccgccggccgcaaggcaatcatggccgacctggtcgccgaatttgaccgcctcctcaaccgcgccgaggtgaacgacggggaacactggcgacacctgcggcccagtgacatcgccgtcctcgtgcggcgccgcgccacgggacaggagatccagcgcgcactcatcgccgcgggaatcccggcggtgttcaccggcggtgagggcgtgttcgcgtcgtcggcggcacaggcctggctcgttctgctctccgcgctggccgatccgcggccgtcggtgttgctgcacctggccagcacgccattgatcggctggtccccccgggaactggccgacgcggatgaggaccaacgcaccgaactggtcaccggtgtcagggccctgcaggcgacgatgcatgatcacggggttgccgcggtctatgaggagctgtcggcccgctatcggcttcctccccggctgttggcacagcccgacggcgagcggatgctcaccgacctgcgccatctggcggagcgactcaattctgccgagcgccgacaccatctggaccttcccgcgctcaccgcgtggctggcacaacggatcgaccaggcccgcaccagccaggacgacgattcggtgcgccgtctcgaaaccgagcggcgggccgtgtccatcatgacgatccacaaggccaagggactccagttcccggtggttgccctgcccgatctggccgatcggtactccggctcacgctacgaccgcgggtggaccacctcgatgctccatgtcgacggacaattgtcgatcgatctctacaccgacatgtcctccgaccgtgaggcgatcaagcaggccgaggaacaggccgaggacctgcgacttgtctacgtggccgcgacgcgtgcccagagccgtctcattgcgtggtgggccaacaccaagttcaacacctccacctcaccgctgcaccggctgttgaacgcggacaaggactcggcgctgccgccggccctgaatatcgccgggggtcgccatccggaccagtggccactggaccgtcaagtggttgacgtggtgtcggtgccgcgcccgtccggaattgcctcggtgccgcgctccgccgatctggttgccgggttggcggcacgcaagttccatgaccacatcgatcgtgactggacgcgcacttcctacagtgggctgactgctggcctgcacggggagagccttccgccgggatctgtcagcccgcgcgacgacgagcccgatctcgatggcatcctggctgatcccggcgaggttgacgggccggtatccccgtccgcgctgcagccgaacggcctcgccgagcttcccgggggcacccagttcggatccctggtccactcggttctggagatcaccgaccccgcctcgtcctcgctggactcggacctgctggaggccagtgccaggatgcttcgtcggtggccggtcgcccaggtacccgcccaggggctggccacaggccttgccagcgtcctgcgcgcaccgctgggcgacctcaccaatggtcgctccctgaccgacctgggcgccgtcaaccggctggcggagctcgaattcgaaatgccgctgggccgggcttcgcggcaccgtgcggtgtcagacctggccggattgtgggccgaccgtgcactggtacccgaggacgacccgctcgttgactacggtgctgccctggcaggctccgcggccgccgatcgcacgctgtcgggcttcctcaccggttcgattgatgccgtactgagggttgccccggccgggcacgccggggccgccgactccgccacggcccagttctgcctgattgactacaagaccaatcgcatccccgtgcgccccggggaccacctcggcccccactcctatacccgcagggcaatgaccgacgccatgatcggcgcccactaccccttgcaggcgctcatctacagtgtcgccctgcaccgatacctgggccagcggctgccggggtactcccccgcgatacatctcggaggagtgggctatctgttcgtgcgcgggatgacggacgatccgtcggccggggatcgcctgcccggtgtgttcctgtggcatccgcgacctgcgctcgtcgcggccgcctcgtccgtcctggcagggggtgacccacgtgattcccagtgatggccgcgtcgtgtcggccaccggcgttctcgcgcagttcgctgccgcgggagtgctggaggcagcggacgtgcatgtggccaagatggtgacgcgtaccggtggggagaacgatccgtccgtcgccctggcggtggccctgaccgtgcgggcgttgcgggccggttcggtgtgcctgccgctggaccaggcacgtccgatggcgcacttcttcgtccgtgaggacgacgatcaggccgctcgcactgacattgacgccttgccgtggccggatccgctggattggttggccaccgtggtggactcgcccctggtcggcgatgaggacgccacgatcaattcccggccgctgcgctgcgtggacggtgcggtctacctggaacgctattggtgcgatcaggagtcgatcagggtcatcctggcccaccgcgccgaaccgctgcccgccgttgatgagtccgccctgaccgcggcgctggatgagttcttccccggcggggaccaggaggccgaccaacgccgtgccgtggcagctgccgtgcggggacgcacgacggtgatcgccggcggcccgggcacgggcaagacccggaccatttcctgggtggtcgaggccatgcgccgccagtggatggcccagggcgagaccgggcggatcgcgctcgccgcacccaccggcaaggccgctgcccgtctcaccgagtcgctccgggagaacacggccggcccctcctcccctgccgggacgcagggggcgggtgaggacgcgatggcagtcccgggccaactccacgcggtgaccctgcatcggctcctgggagcacgtccgggacgcggcgtcagcttcggacccgctcgccggctcccctacgacctggtggtggtcgatgagatgtcgatggtctcgttgagcctgatggcacgactgctggaggccctttccccctcgaccaggttggtgatggttggcgacgcggatcagttgacgcctgtcgatgccggcgccgtgctggccgacatcacggccgcggggctcgccggccccgatcctctcgggggcggcatcgtggagctccggcacggatttcgcttcgattccgcgatcgcccagttggccgatgccgtgcgtcgcggtgatgccgatgccacgctggaattgctccgggcctcgcccgagggcctgcagttcgacgagctcgacccgggcatcgtcgaactggatgcattgcccgcgctgcgccgcgaactcgaggtgcaggcccggggcattggtcacgccgcgacatccggggatggcaacggcgcggtgcgggcgctcgagggccaccgcctgctgtgtgcccaccgtaccggcgtgtacggggtgagccgctggtcggcaatggtccagcaggtgcagcgcccggcgctggcctccggctcggatgccgatcctgactggttcaccggacggccgctgctggccacccggaacatggcggaactgggtatcagcaatggcgataccggggtggtgatcgcgacccccgaggggccgcgggcagccatgagcaatggacgcagctatgcaccgttcgtgctcgagggcatcgagacgatgttcgccatgacaatccacaagtcccagggcagccagttcgaccgggtcacggtcgtcctgcccggggccgactcgccgttgctcacccgtgagctcctgtacaccgccatcaccagggcccgccggggagtgcggatcatcggattgcgcgaggccatcgtcacggcggttcggacgcccgcgcgccgtgcgtccgggttgaccgatcggctacaacgcacgagtgtccgaccccactgaggctcgcgaccacccgggagtggccgggggcggcgctgccgatgcgggtgttcagccctccgggctcggcagtgtcccctggagccacgagttgaccaggcgacgtcccaccgaggccccgggaggcagggtcagctgctggtcgtgcaggccactgaccacctgctcgcggctgtaccagccgccccaggccagttcctcgccatccacctggcccccgcccgtgctgcgggccacgaaactcagcatgagcgagcgtggcagcggccagggctggctccccagatagcgcatggcggtcagcctgagatcggcctcctcaccgatctcacgggccacggcctgctcgacgctctcacccgcctcgatgaacccggcgagcaccgatacccgcccgtcgagccagctgttctggtgcgccaggtagatccggtcaccgggatcgagcacggcacagatgatggcgggatcggtgcgcggaaaggtctcggtgtcgcagtctcgacagaccgccgcgaaaccgcccagggtgcgtacgagggggcctccacagacaacgcaatgccggctgcgccgataccagttcagggacgccagggcggcggaggcgatctcgcgctggccggcgctcaggggggcgtgacgcatggtcgtgctcaatgccgcatccacccggcgcgcgaaccaggcggtgccgtccagcaggcccacgaagatggttgattccgtgggcaccgcgccatcggcgtcgatgagggcacgaccgaaggggtcgatgtcgaagcgtccctgttggtccaccaggaggagttggctccccgcagacttccacagccgaaccaggttctcggggtcatggcgcagctccgacgcatggtcgagcagcgccggatcgtcccaaccgctcagcgaccaaccaacccgttcattgttgcttgccacatcctcaggctagccggatcggtgacgcggtatgcccccactgtccgcggcacgccggccgggcccatcgggagccccgggcatcggatcgttgaggcccggcaggtgctcgaccagccgggtcagctcgtcacgtccgggcagccccgtcggacgctccacgcgtccgctcatcacgtggcagaacacggcgtcaacctcgtcaggctccacgcccgagacatctgcccacgcaagccggtacagggccaactgcaagggatcggccgggccgtcaaaggtcttccaatccaccacctggaagcgatggggacccgacccgggcaatctgtacaccgcgtcgatacgcccgcggacctgacgtgatcccagcaccaggatgaagggcgcctcgacacggtatggcgtgaggtcggcgtagggaccctcctcaaagcggcgctgcaggatttccagacgtcgctgggaggatgcgtccatccgcgcgggcaactcatcggacgattcgtcgtcgccaacgagcagccccgatccggcgcggaatcgttgttccagccaatcgtggaagcgcgtgcccacaccggctccaccgctggcccgacgcggcatcgggcgcaccagattcgccgcgaactgttccggttcggcctgcgacaggatgagggcgctcgcggacaacgattccacgggcaccacgcggtgggcgtcccgggcctgctcgcgggccgccctcaccagcagctgcgcttctgcctgccattcctggtacgcctgttgctcgtcgagtgacaattccccggcaagctgcgcaggcagttcaccgatgccggggtcgccacccgcaccgggaccgagccgtctgatcaggccctgaacggtccccgcagcggtttccacgagctcctcgcggtcgggatcagcaggcctcggccataccgccgtggcggggaccgccgccaccgggttgtcggcatcgggggccggttgctccggcaggtcgcccccggagatctgtgccagtacgcggaagtactcggaggtgtgcgaggcggtcttgcgctgcggctcccacacgtgcgtggtggccaccagatgacgccgggcccgggtgatcgccacataggcgagccggtcctcggcgaattgtccggcgctgcgcaggtcggtaccgaaggcctgcaggccagccttcgtggtctcgccaagctgcgggatgcttcccgcgtcaccgcgcaatggggagggcaggagtcgggcaagggtggtccagttgtccccccgcacagtggccgggaaggtgccctccaccagggttggaaggtagacggtgtcccattccaggccctttgcgcggtggacggacagcaatgacacggagtcgtcggcagtgggcagcgcctgctccatgccatcctcctcgtcgaggaccgactcgacgtacgacaggaagccgctcaatcgcgccgtgccgtcaaggtcggtgaagtcgccgaccacctcgaggaagcgcgccacctgggcacccatgtgctgcgaataggtccccggatccgcaagcagctcaacgcccaggttcatcgctgccacgatgcgccgaaccagtcccggcaggggctcactgacgtgacgacgcagttcccggaattcggcaacgaaccggcccaggcggctgcttcccagctgggacagtcccgggcatggcagatcgagcacatccatcaggcaggccatgggtctgcctgcctgttcctgctgtcgggccaattccgcacgcagggaggccggcggatccgccgctggggtggctccgccctggtcgcgggatgggtcggatcgcaccgcattcagccggttcacggcctcaccgagcgccgccaggtccgggggtccgatctgccatctgcgggaggacagcaattggaccagtgcggggttgtcggtgtcatcgtccaacagcctgagcgtggcaacgatctcgctgatcacggcgagccggaacaggcctgccagcccgacgatctccgtcggcacgtcccgtgcactgaggcgacggaagagcggttcgatggtggcgttgcgacgcaccaggaccgcgatgccggcatatccctccagggcaccacgtgcggcgatgtcgtcggcgatccagtccagttcctcgtcgctgctggtgaaatggcgggtcgtcaccgttgccggttcctggcccggtgcagcatgcagtgtgaagtccacgccgggcaggtggggcatggcgggatcggactggagaccctgtgccaccacgttggcgccatcgaggatctccgggccgctgcgccggttgacgcgcaacgagtaggcattcgcagcagtgccgtcggccttcgggaagctggtggggaattccgcaatattgctcgccgccgctccccgccacccgtagatgctctggtagggatcaccgaccgctgtcaccggatggccccgcccctcggccaccgtggggccactgaacaaggttgtcagcagggtggcctgtgcgctggaggtgtcctggtactcgtccagcagtagtacccggtactgctcgcgcagcatcgtcgacacctcgggtgcccgttcggcgatcgttgctgcctgggccatcagatcggcgaactcaacccatccgaggcgatccttggcgcggcgatatgactccacgagtcccagtagctccagccgctcggccgcgacccgttcggcgtccacgaccgcgcgatagggagctccccgccacaggggcgcctcatcgagtccgccgacatagtccgccgtgaactcctcgatgcgttggccggtgaccatgtgctgggtcatcatcgtgtcgagtccgagcagggctccgatcaatctgcggtcattccactcccccagtgcgacgagggggaattcgttggctgccaccacctgggcggccagtcggtaacgcgtggcatccgtgagcctgtgctcagcgggatcaatgccgatgcggggcgcgtgctccgagaccagttgcccggcaaaggagtcgtaggtcgtgacggtctgggcctcggagttctccagcgcggcggcgtcgatgatgccggacccgctcagcgcggtggtcacccggttggacaactctgcggcggccttgcgcgtgaaggtcagtcccagcacctgatcggcacgcacctggccggtacccaccagccacacgacacgcgctgccatcaccgtcgtcttgcccgacccggctgcagcgatcaccacaccgggctccagcggagccgcgatcactgccagctgctcgtcggagaaggggatcgacaagatctcccgaaggtcctctggtcgctcgaccgtgcgtccgctcatcgtgaactcgcctcccgggcccagatcgggcagtcggcacggtggtcgcagtagctgcagggcggcccctcgactgccgggtagtcctcctcgaccacgcagtggacggcgaaggccagtgcatcgtccaccatggtcggcccctggatgtccacgtcaccgcgcaccagccaggtgttcgccagctgttcggcggccgggtagggatggtcgtcaaggccgggttgtcccaccaccttgggcagcagcgggtcgcgtgcgcccgccggcagccgcagaaacaccagcagggcgccatccatggcgggggtcgagccggtcagttcgcggcacgcgccgcgcattactgccagctggtaggcggcgagctgcagattggatgccgcctcggtgcgactgggtgcccggctcccggtcttgaagtcgatgatccggatgcggcccgaggtccggtcgcgctcgagccgatcgatcgatcccaccagttcgagtggctgtccgccgatgacgaatgtgtgcctgaccggcacctcgacgccgagtacctcggtgggttggccgccctgccatcgttcgaaccgggtgatcatctcgtgcgcccgggaacgctcaatgagcgtgcgccaaccctgctggtggacgtcgaggtcattccaggcctcgtcgagggcgtcatggagctggtcctcactgaggtgatcggtcacggcatgttcggcgaggagatggatcactgatccgacgcctgccgcaaacccgcctgtggtggcgccgcgcgccgctacgtcgaggaaccactgccggggacaggcgatgagcttctgcaggccggtgaccgacaagcggatggccttgtcccgggtcgggccctccggctcccccacgccggccggggagggtgtcccatgacggcctgacagcccgccgagtccccaccaactgcggggatccgcccccggcacaagggctcgttgctggtcgtcacgcaccacggcgagctggcccagttggtgggcggccgcctcccggagtcccgcggtcgagcgttgatcggcggtgaccctcctcagctcaccgaccagtccctgaagggaccgggggcgtcgggtgtcgtgtggcacggcaaggacctggccgccgagctcccgcacgaaacgcgatgcctgtgcctgctcgtcaccggaacccaggtttgccgtgatgaccaattccttgcgggcacgactggcggccagcacgaacgcccgccgctcctgctgcatccacgccccgggcgccggtgccagccccgggtcgtcggcgtcgagcaattccgccgacaggagcccggctccacggcgattacccggccacgatccctccgcagcgcccatgatgatgacgcgatcccactcaagccccttggcccggtgggcggtgagcacctgcactccccggccccggggatctgattcgcgtgcctggtcaccggggatctcctggcccgagacctcagcgatcagggtctcggcgcccttctgacccgtgagctccatgtgccgcgcggcgacgtcgaagagggccaacacggcatcaaggtcgctgttcgcctgtccggaggaggccgaacccgatagcgcctcgccccgcagccgggagggccaatcagtgccgtcccacagccgccacaacacgtcgtaggccccctcgccacgcatgatgcgcgccgcggcgtcgcccaacagcgccgccagttcccggaccggttccaggtccgggtcggtgggcagggccgacgttgcggtctgggccgtgggccctgtgggcggtgtcgtgacatccgtcggagccgccccggaggtgtccggacggtgaacgagcgccccgacgtcctgcgccgtcgccgggggcaccaccgggctcggcaggtgatcacccgcccgacgcatgaggaactggcggaccaatgtcatcggatccgatgtcgtacccgacgcggcctcgtgccacagggctcccccgacgcgccgcagcgcggtcgggtcaagggatgtcaacggggacagcaggagccggtcaagctgattgggatcgggcggtacccggcgggagaaacccagcgcgacggccagcgcatccatcagggtgacgacacaggcctgttcgctcagggcgatgtcactgcccgccacttccaccgggatcccctgattggccagcccccgcgcgatggtgcccaactggccgcgaccggcccggcagatgaccgcctgttgcgaccacatgaccccggccagcctcgctgttcgcaggtcttcggccacaccggcgatctcggccgccgccgtctcgtagctgcgacacacgatctgctcggcccggtctgccccggagaccgcccctgcctcgtggggccgggtgcccgatccgccaccggcgaccggattgcgcgcgatcaggctggcgatgcctcgttggagaccggcggttccgcgtagtgacgtggacaggtcgatccgctccggccccggcaggccggtgacctcgaaccgacgcccgaagtcggccacggcgcgcggatcggcaccacggaaggcaaagaccgacgattgcgggtctgcggtggcagccaccggaatacccacctgatgcacctgttcgagcagtgcgatctgggagcggtcgagctcggcgaactcatcgcagaagaccccctcgatctcttcggtcagcaccgagctgaccggcgcctccagcaggagcaacctggtgcggtgcacgagttcggcgtagtcccaggcgggttgggcatcgagcacgtcaaggtagttctcgaagaacaggcccatgctcacccactcctcacgccccgtgcgccggcccagccgcaccaggtcgtcgggatcaagtccctgctgccgcgccctggccatgccggtgcgcagctcctgcgaaaaggccatcgtggcgatggccgcacgcaccgattcgggccacaggtcccggccgagttgcaccacgagctcgcgcacctgcatctgctgctcaggtccggtgagcacatggggcaactggccgtcggcatcgaggtggccgaaccggcgctgcagggcgaggcaccaaccggggactgtggtgatcaccggcgccaactggctgctcgccagccgggccacgatgcgtgcacgcaagcgctgtgctgccggacgcgaccaggtgagcacgacgaggcgatccatgtgcgcccctgcctccacgcgttgcgccaccgcctcgaccagtgcggtggtcttgcccacgcccggcccgccgagtgcgagcacagcgccgtggggccgggcgcacgcctcgacgaacgcgcgctgctggtcgagcagctggaatgacatgcccccatgcaaccacgcggcacccacagtttccggcgacgccgccgtcggcggtgcaagctccggtgaggggacgctgccgcgacaccgggacccccgcggaggccccggacgcccgtttttcgcactgggaatctttccaaaaccatcaccgggacgcccagcgctttccatctggggtgcactgtgagaaactggacacactgttctaaccgggcacgcattcagtatcaggagtctgggtcgcgtcatggcacagcaacaccggatatttggtgcgctgaaacgagcagcgggccgtgaggtgcggcccggcaagtaagtatgtagggagtacacatggccaccggaaccgtcaagtggttcaacgcggagaagggctacggcttcatcgccgtcgacggatctagcgatgacgtcttcgttcactattccgcgattgattccacgggtttccgttccttggacgagggacagaaggtcgagtttgacatcgctcagggacccaagggtcagcaggccgagcacgtaaagctcgtcaactgagcgtccaagccgcttaagcaaaatgggggtctcgccgaaaggtgggaccccttgcttgtgtctccgccctggactgatctgcaccccgattcagcgtgccctaccgatcatcgataagttgccgccatcgcccaggggccagccagccgcgacaaggaaccagccatgacgaatgaatcacccgccaccgaccgcgataatcttcgccgcggccccaccgcgtgggctggtggtgccacccacgtcggcaccaaggccccaccgaaccaggatgcgctggtcgttgccgcaacacccggcgaatcccaccgcagcgccatcgtggcggtctccgacggcgtgtcgacctctccacattcggatgtcgcgagccagatcgccgttgacgtggccaccgatcatctgaccagcgtgctcaccaagccgcatcacagcgatgagccgtcggcgctcgccgacgacctgaaggccgccgtggtcgccgccaacgatgcgatcgtcgcagcggctggcgacgatgtccacggctatgcctgcacgctggttcttgccctggtgcaccggggattggtcgtggtggccaacctcggcgactcccgcgcctactggttcggtgacgacgccaccaatatgttgctcaccactgacgactccatggcccagctcagcatcgagctcggcacctcccgcgaggtcgccgaggcgggacgccaggcccacgcgatcaccaagtggctgggcccgaacgcaccgtccctggagccacagctggccggcttcaaggtcgctggttcgggatggctgctggtctgcagcgatggcctgtggaactatgcctcagcgccggcggagttgcgggcggtgtgggattccctgccggccgcccctgatgcgacggctgagacgctggctggccagctcatcgactgggccaatgcgcgcggtggccgcgacaacatcaccgtcgggttggtccgcgtcgaggaacccgacacgcccgccccggagcagtccccggcagggtcgacgcagtcctgaggagggcgcgaggcccgaccgcacgacggcggagccaccgccactgccccgtgatcatgcccgtagcgcaatcgccggtggccggcccgggccggccaccgggtagatttgagtgcgtggatatcaagattggcattgaaaacgtgaaccgtgagctgggcatcgaaacagaccagacccgcgacgaggtaacggcggccctcaaggaagccctcagcaacgacggcgtcttcacgctgaccgattccaagggacgtcagttggtcgtgcccggggcaaagattgcctatgtggagttcggcgaggagcatgcgcgccaggtcggcttcggcacgatctgatcgaccccttccggccccgtcgtcgtgacgggccgggccggaaggcctcgcgtggacgccacctgacagcagtcacgcaaagacggcctccccacgtggtggcctcacgtcaggaaccccctcatccgacagcagggcggggccgcggttgtccgcggccccgccctcgcttgtccggtgaaagattcaggaggccaggccgagccgtgccatgcgtcgggaatggccctccatcagttgctcgagcagtacgctgaccgctcccagcgccgccatgtccccggtctgggcgtcatcggggcggggcaccgcagaggccaccagctccgtcagctcgacctccttggcggcgatgcgctggcactgccccagtgcctcggccgccaggcgacggccgtagagcgccaggctgccggccagatcgggatcgtcggccagtgactgcgacagggtccggttggcgaagtccgcgatccgccaggcaacgggccccggtgagatgagccgcgccatcggttccggccacgccgccgagagcttgtcggcaaagtcggtgcgcaggccgctcaccaggagcgacctcagttgcgccgtgggccagtcagtcggttgggtcgcctgcgcgaaggcgtccaggggctcgcggaatgcctcgaggctgtcaccaaccggccaaccatgggcatgcaattgatctgccacgcggttgaatcgcttgaattgtgcggtggccaattccgccacggcaatgcggtcatccagcgttggtgcgaattctccggagaaggacagcacctcgaagtcgaccagctcgcactgccccagcactccgagcagttcgcggccacccaccggcaagtcgatcgggatggtggggggcgtctccgcccggcctgcaggacgcgtgttgggggcacctggttcagtctgctgcgcactcacgggacaaggctaccggcccccgggccgactcggatcggttgaaacgcgccggacggctagacttggcgtggtgcataaccatgcaccacaaccatgtgccgccatcggctcgcccaatccgcaggccaagagctcggattgatggcgaactcgggacgcatccacgcgagaacccttgacggttcgacgcaggggacgcgcaccgacgcgttggccacacggtgcaacccaatagcttgtcccgacgccgtgcgcagggacggagaactggattcatgacgctttccaccactgatccggacgcagccgagcccgcgaagaccaccttcgccgacctcggcgtggcgccctccatcgtcactgccctcgatgccgagggaatcacacacccattccccatccaggagatggcgatcccgatcgccctcaccggcaccgacatgatcggccaggcccgaacgggcaccggcaagaccctggccttcggcatcccgatcctgcagaaggtcgtcctcaagaccgacgagggatttgaccagctcgatcccaaggacaagccccaggccctggtgatgagccccacccgcgagcttgcccagcaggtcggcagcgacctggcgatcgccggacgtgaccgccacgcccgcgtgctcaccatttacggcggcgtcggctacgacgaccagctcgatgccctcaagaagggcgtcgacgtggtggtcggcacgcccggacgcctcctcgacctggtgcaccgcggaaaccttgacctgtcccatgtgcgcatcgccgtgctcgatgaggccgacgagatgctcgacctgggcttcctgcccgatgtgcaggccctgctcgaccgcactcccgcgtcgcgccagaccatgatgttcagcgccacgatgccggccgtgatcatgtcgctcgccaggtcgcgactcaaccagccggtcaacatccgcgccgagggccgcgatgcccaggcaaccgtgccgcagaccacccagttcatctaccaggcccatgagctcgacaagcccgagatgatcggcaagatgctccagtccgagggcatgcgcaagatgatggtcttcacccgcaccaagcgggccgcgcaacggctggcagacgatctgcgcgaccgcggattcgaggcggcgagcctccacggcgacctgaaccagtcgcagcgcgagaagacgatgaagcggttccgcaacgacaagatccaggtcctggttgccaccgacgtggccgcgcgcggcatcgatgtcgacgatgtcacccacgtggtcaactacgaggtgcccgacgatccggagcagtacgtccatcgcatcggtcgcaccggccgggccggccatgagggtgtggcggtcaccctggtcgattggcaggatgtcacccgctggaaggtcatcaacaaggcgcttgacctgcccttcccggagatcgaagccacgttctcgaccactccccagttcctggaagacctgcacatcgcacccgacaccaagggccggctggccgatgcgaagccccgtgacgagggtgagcaccgtggtgacgagcgtcgcgaccggggcaagggccacggcggcaagggacatcacgatcgtggtcgcgaccgtcacgaggggcatggcaagaagaaggacggcgagcaccgtcacgacgcgaaggacaaggacaagggcggtgacgccaagcgcgaccgcccgcatcgcaagcgccgtcgtacccgcaatggcaagcccgtggccgcccagcacaaggacgactgattgcttgaccgcgtgatcgcttgacgacaagacactggtggggcagaccgtcacggtctgccccaccagtgtcttgtcctcctgcgctgccttgttggcggcgcacggcagtggcgccgcgacgcccggtcggctggctagtagtccatgttcatggccgccaacacatcgcgcagcgtcgcatcggcgatctcattggcccgcgcattgccctcgtgcagcacctgtcgcagatagccctgatcggcctcgagttccagcctgcgggcgcggatcggggcgaacatctcgttgatcgcctcggtgcaggccttcttcagggcgccaccaccgccatcgccgatccgggcggcgacgtcctcgggcttctcaccggtcgccagggcagtgagcatgacgaggttggagacctcgggcctgttctggggatcgtaggtgatgtgccgatccgcatcagtcttggccttcttgatcagcttggcggtctcgtccgccgtcatgccgatctgaatcgtgttgtggcgtgacttgctcatcttggtcccatcgaggccaaggatcgacggcgccgcggacagcagggcgtcgggctccgggaagaccggctggtccggcgtggcccggccatagcgctcgtcaaaacgtcgtgcgatgaggcgggtgacctcaatgtgcgggagctggtccttgcccacaggcaccagattggccttgcagaacaggatgtctgccgcctggtgcaccgggaaggtgagcatgagcccgctcatcgggcgtccccctgaatgctccatctcatccttgaccgtggggttccggttgagctccggcacggtgatgaggctcaggaagggcagcaacagctggttgagggccggcacggaggaatgggtgaagatcgtggtgcgggcggggtcgattccgcaggccaggtagtcggccatgccggacatcacattgtcctgcaggtcccccacgccgtcgcgatcgtagatcacctggtagtcggcaacgaccagcatcgagggcacacccaggttctgcaggcgcacgcggttgctgatggacccgaaatagtggccgatatgcagctttccggtgggccgatcgccggtgaggatgcggtacttgccgggattgacgccgatatcggcctcaatggcatcgctacgggcctgactggctaccagcgtctgccgatctgagcctccccgcgcttccgtgtcgggtgatgattcttcgggttcggtggcggaggtcaagctcatgcgcctcagtctacagacgacccatgagggtctcgactccaccgatcgagcctccgcgtgccgtgatgcgcaacgcgagctcgtgcagggcactcggcctggtgacgcaggtcccgaggtcatggccggtcttgccggtgccgtggtagtcagagccgccggtgcgcatcagccccagccgtcccccgagctcgaagagcagggcacgtgtctgctggtcctgatcgggatggtcaacctcaatgccgtcgaggccgtggtcggccttcagcgaggccagcagcgccgacgtcacgacatcgcgggtgccccgaatccacgggtgggcgatgatgcatgccccgtgggcaccgtgcaccaggtcgatggcgcgtgccagggcgagggtctcccgcggcacataggcaggccccgtgctgtcgaggtactttgcgaaggcctcgtcgcggttggccacatagcccttggccaccaacgcatcggccacatggggacgtcccgccgacgaggcgcccagcatctgcttctcgacgtcgcccacggagaggtccatgccgagctcatggagcttggcgatcatcttcgggagccgatcgagcctggacgcccgcatgcgggcgagttcccggcgcagcggctgggcccatgggtcagcgccgtagcccaacaggtgaacctcggttgaccccacatgggtgctgatttcaatgcccggcagcacggccaccccgaagcgacgtccggcctcctcggcctctgcgagtccgtcgaaggtgtcgtgatcacacaaggcgatcacggcgagcccgtcacgttgtgccttctgcaccagcgcggtgggagtgtccgttccgtcagagacattcgagtgcgtgtgcaggtcgatgagcatgccccaatcctgccacgtttgggggttgccacgcctgcgttgccggccacccgaaggacgggcaacccaccgctcgcgcgatgtcgccccaccggtgccacaagggggccgcaacacgccagaatgggggcatggaattcacagccgaacaccattacgacgcagagccagccgcggtctacgcgatgttcaatgatccgcagtggtggcgcaccctggttgagcgggcgggcgccgagagcagcaggatcaccgcacaggacgccacggtggacgtgcacatcgaactcaccactccgcagaaggcgcgtccgttcgccggcgacacgctcggtctcgatcagagcttcacctggaccccgacggatggtggctgggatggcaccttccggcagggcacggccggcaagctgcctgccgcatcgaccggcacggcaaccatccgggcggggcacggcggcaccgatgtgcactacaccggtgagttcaccgtgaagatcccggtgatgggtcgcaagctggaggccatggcggccccttatgtcacccagatcatcgacctccaacagaaggtcggcaccgaatggttgtcggcgcacaagggctgagtcccctggtgaccggtgcctccgcgcggtcggcaccggtccccgtggtgggccggcgtcagtcctcagtgacctcggccgccgctggaatgagctgcgcgatctgcaagcgcgccaccggcgttgccacaaggtagctggccggttggtcctctcccccatcgcgctgggtgatcagggccacctcgtcgccacgatcacgcagcgcgtcggcgaggcggaccgcctcgccgtggtcacgcagcacaatgcgtgtggtcatctcaatgctccttcgccttcacggatgccggtaattcgctgacgtcgtgccacaggaggggcgcatccgccgcgagggcctgcacatcggtgttctgccatgccccatcgatgtccgaatgcgccagcttgcgggccacgtcggcctcatctgccgggtgcggcccggtgaagaaggccgtgaccgccgacagcggcaggcccggcagcagcactgccccgttcggctcctcgccgggatctgcgtccccgtgggcatcgacccgggccaccatgacgaggcggcgatcgccccgaatcaacgaccacacggccgccacctggagcgcggccagctccgcgtcctcactgtcgggttccacgccgaaggtctcacacaggcccggcgtgatggcgatggccgacacgggaccccccagggtgcccgtcgtcaccagggaagcagcctcatcggtgcgcaggggcacgaataccagtggcgccctgtcggtgcgggacgtctttgtgctcatgggttctcctccattgatgtggctacccggagttttccacaattgacgagctggggttgtcgtcgtcgccacccaccggcatgctcacccccatggacaatgcgatggctgatctccccgtgcctcccccgcagatgtgggcgaccaacgccgggccggtggagtgcgtgggtgtcgtgcggcaggcacgtcccccgctgcagttgggggcggggtggtcgaggtcacgtcctcaagccgtgcagcatcgtccggatccggctgcccaccgcctcgcgatcacctttgcccgcatgatcaaggaggccctggcagggacccgtccggcccgccagctgcaggcggtgatgcgcgcggacaggctggagcaggtggtgagcatccagcgcatgggaggcctgaccgggatccgatgcacccatgtccgcgcggatcgtcccgcagcgggcaccgtggaggcagtggcctgctaccgctggacctccgccgagcctccaccacccggtggtgagccagcggagcgcgcgttcgcggtggccttccggttggacttccgacggggccggtggtgctgcgacgaattgcagatcatcgcctcggcgcagcctgaccgggcagcctgactgatccgccccgcagggcagatcagtcccccacaccgcctatcggatattcgggttccggccgtggcagttcttgaacttcttcccggagccgcaggggcagggatcattgcggccgatcccggcgaacaggtcatcctcatcggtcttctcgtcgccgcgcagttcctcgacatccccggtctcggtgggtgccgaataggtcatgtgctgcggttcgttgcgttccaggcccttgatggccgcccgcttgaccgcgggtgcctgggcgggctcggcggcgcgcttggcggtcctcgtcgccgtggcagtggccgctccgctgcctgacggcgagtctccgcccgccgacagcatctggcgcacgtccacctcctcgccgttctcatcacgctggacgccgacctcgggggcgtcgggcacctggatgtcgaggttgaacaggaagccgacgacctcctcctggaatgcggcgcgcatggcgtcgaacatgtcggcgccctcacgcttgtactccaccagggggtcacgctgggccatggcgcgcaggccaatgccctcgcgcaggtagtccatctcgtagaggtggtcgcgccacttgcggtcgagcacggtcagccagacctggcgttccagctcgcgcatcatctcttccccgagcttcacctcgcgggcgtcgtaggcgtcctgggcgtcggccttgaagtcgtcgaccaactcatcgacattctcgatgccgtcgtagtcggccaccttcaggctcaccgggtagagctggcgcatgtcattccacagggcgtccaggtcccactcgtcggagaagccctgggtgtgcatccgcaccgcggactcaacgacccgatcaaccgtcgagcgcagcattccctcgacgtccgcgccctccaggaccttgcgacggtcgcggtagatcacgtgacgctggcggttcatcacgtcgtcgtacttgagcacattcttgcgggtctcgaagttctgggcctccagctgcttctgggcactctcgatggagcgcgacagcagcttcatctcgatgggctggtcctcgggcaactgcatcgaggtcatcacccgttcgacggcctccggcttgaacaggcgcagcaggtcgtcttccagcgacaggtagaagcggctctcaccggggtcgccctgacggccggaccgaccacgcagctggttgtcgatgcgtcgcgattcgtgtcgttccgaacccagcacgtacaggccgcccgcgtcgacgacctcctcatgctcgtcggccacctgtccctcaaggtccgacagcgtgtcagcccattgggcctcgtaggcctcagggttctcgacgggatcgatgtgacgctcgcgcagcagctggtcggccaggaactcggggttgccacccaacatgatgtcggtgcctcgaccggccatattggtggccaccgtcacggcgcccttgcgtccggcctgcgccaccaccgcagcctcacgggcatgctgcttggcattgagcacctggtggggaatcccggcggcgcgcagtcgccgcgacagttcctcgctcttgaccaccgacgcggtgccgatcagcaccggctgcccgttgtcatggcgctccacgacatcatcgacgatggcggtgaacttggcatcctccgaccggtagatgaggtcggactggtccttgcggatcatcggcttgttggtcgggatctccagcacgcccaggccgtagaccttctggaactcgtcctcttcggtcttcgcggtgccggtcatgcccgagagcttgtcgtacatgcggaagtagttctgcagggtgatcgtcgcgagcgtctggtactcgtccttgatctccaccttctccttcgcctcgagggcctggtgcaggccctcgttgtagcgtcggccggccaggacgcggccggtgtgctcgtcgacgatcagcacctcgccgtcgatcaccacatagtccttgtcgcgcttgaacagctccttggccttgatggcgttgttcaggtagccgatcaggggcgtattcgcgctctcgtacaggttgtcgatacccaggtcgctctcggtgacctcgatgccgtgggcgagcactgagacggtgcgcttcttctcatcgacctcgtagtcggtgtcacgctccagtcgcacggccaggcgggcgaactcgggataccactgcttgttctcggtggccggcccggaaatgatgagcggggtacgcgcctcgtcgatcagaatcgagtcgacctcatcgacgatggcgaagtgatgaccgttctgcacgcagtcatcgagggtcagcgccatgttgtcgcgcaggtaatcgaagccgaactcgttgttggtgccgtaggtgatgtcacatgcataggcacgtcgccgctcatcgggggccatcggtgcgaggatcacgccggtcttcaggcccaggaagtggtgcacgcggcccatctgctccgcctgggactgggccaggtagtcattgaccgtgaccacgtgcacgcccttgccgtccagcgcattcaggtagctgggggccagggcgacgatggtcttgccctcgccggtcttcatctcggcaacattgccctcgtgcagggccgcgccgcccatgatctgaacatcgaagggacgcttgcccaacacccgcttggtggcctcacgcacggtcgcgaacgcctcggggagcaggtcgtccagactcgcaccgttgtcgagccgctcacggaagtcggcggtctggccgcgcaactcctcgtcggtcatggcaacgtagtcgtcctcaatgctgttcacttggtcagcgatacgcgccagccgcttgagggttcggccctcgcccgcgtgcagcaggcggtcgatgaaactcacgagttggtgtccttataggtcgatcaggtcggcggggcgcacagtggcaccctatttcgggtccatcctaggcgctcaaaatatcttaagtagtatgccgcccggcaccggtggctgcgcggcggcgtccgacgacatggcaaaccgcccggccgggggacgattcccctgaccggacggctcttggttccccgtgccccagcggccaaccatcacgccgcaggggttcggggaatccggtggatcactgcacctcgaggtgaatgacaccgtagtcgtaggccttgcgacggtagaccacgctcggcttgccgctggccgcatccacgaagaggaagaagtcgtggcccaccagttccatctggtccagggcctgcgccagggtgagcggggtggtctcgaaggtcttctcgcgcaccaccatcgggccgtcaccgtcgacggtcatgccggccacctcgtgggtgtcctcggcagtcttgacgctctggtcctccaccgcgaccggcaggtcggccagacgctggccgccgcgacgacgcttgcggcgatccgcggccttgcgcaattgggcgatgaggcgatcaagcgcctggtcgaaggcgatcatcttgtcctcggccattccgccggcgcgaatgaccggacccttgccgcgaacggtgatttcgcaacggatggcgttggatggatcacccttggactcattggcggtgaattcgacctcggtacgaatcacacggtccttgagcttgacgatcgaatcattcaaccggcgactgaccagatcgcgcgttgcgtcgttgatactgatacggcgcccggtgacgatgacgtccatcttgatcccctttcggtggattatctctatcgacgggcctgcaggccactggctcatgaatcgaagggctgtccgacccgcagacgacgaaggcacgagccgcagagtcccccggttcggatggggagtctgatgcgtcgtgccatgtcacaacgctagcgggtttggtcgcccggggcgaggggtgacccgacacggcggggcacggatccggccaattccgtctgtgccgcacaggcgacgccccacacccgggccccggcggcacgcagggcccgcacggcctcccggaccgtcgcgcccgtggtcaccacatcatcgacgacgacgatcgggcgcgcctgccacagctgtggaccgcgggttcgtgggaggcaccatcgcggggaaccgatgctcatggtgccgtgctggcctgctcgtcgggcagctgatcccaggccgatctgatcgcgggtcgcactgaccctgcgcagcagcttgcaccattccagcccgcagacggccgccgcgcggcgggtgatcgtcgtcgtgtggtcaaggccccgggcccgcacccggcgtggatcggccggcaccggaaccaggatggggacctcgccgccggcgcctgcggtcgggccccttgcaccccagaggggcgatgcgtcgccgcccggccccgcgagcagcaggcctgccagcgcccgggacacgagccgagacaggggtgctgccagggtccatgcgccccggtccttgaaggcgatcaccagttttccggcgatggggtcgtaacggctgcccgaccagaccggaaccatgccatcgaccaggtcatccccgtcgggttcacgaaccagcggtccgtcgtcgaggcgtcggtcgcacggggcacacagcaccggtcccggtgatccgcaggccacgcactccgagccgaggagcaggtcctgccccgctgcaatcacatgcgaaaggttcatatgggcagtgtgtgcgcgcccgctcgatccggtgcattccggtggtacgtgcgcacggcagcatcgcgcaccggggccggttcacaccgtcaggggttccgggatccagcgcacatcggtggtgtggccgagtcgatagcccagtccgcgcaccgtcgtcacgatccggggccggtcggggtccgcctcgatcttcgcccgcagccgctgcacgtgcaccgtgaccacgcgttcgtcgccggcatgtccgtatccccagacctccgcgaggagttcctcgcggctgaagacatgtccgggtcgttcgaccagggtgaccaacagcttgaattcggtcggggtcacgttgatcggctcgcggtgacggcgcacctgccggttgtccacgtcgacctcgaggtcatcgaccatcaccgtgtgccgcgcctggatcccattgcgccgacgccgcatgcgcgcctggacgcgcacgagcagttccgcacccgcgaacggttcgacgatgtagtcatcagctccggcccggaatccctccacgatgtcctcggtggccgagccggtcgacaccaggatgatgggcacatcggattcccgcctgatctcacggcagacatccagtccactgcgaccggccaggcccacttccatgaccacgaggtcgggcctggtctcgtggaacgacttcaaggcgatggacgcgctggcgcaccaccgggtggcaaagccaagctccgagagcaggtcatgcagttcatcggcgcgttccgcgtcgtcctggacgatcaggaccagccccggcccgccgacctcaatgtccgtcatcaactccaccagaatcacagcacgcgaagcacgggcaccagaacggaaaacctgtgccttgccactataggaagctggtggaccccgccgggagttgtccggatgtggagcgggctggcaggtcccggtcggggctcaattcagggcgggcttgtcggcgtagccgctcagcaggccggcatccccgccgacgcggcgcagcacgcgccgccacaatccctcggcctgggcgccgaacacatcctcatcgcgggccggtgcgcgcagccagaccccgcgatcaagctcatcggacagctgtccggggtcccagccggagtagccggcaaagacgcggacgtcgctgtaggcgccggcggcgatctccacgggggtgtccaggtgcagcaggccgacgtcgcccagcacgggccgccatccggggggttcctcaccgctatccatcaccttggccaggcagatcgcaccgttgggggccaccgggcccccggcgaagagcaccgatggtgggttgagctcccccgcccaggcggggagcacttctgccaccggcgtggtggagggcttgttgagggccaccccgatggcaccgttctcgtcattgtcgagcaggaagatgacggcctggtcgaagaatccaccgccggccgcctcagagctgaccagcagctcacctgcgtggggcgacgacgagaagttcacgccccaagtctggcacgcgacgacgaatcgtcggccccgggtgggccgtcgtcgtgtccccccgtgccctaagcgtgcccccagcgtgcccccagcagatgaaatcgtggccgattcgtggcgattcgttgcgaccagttgcgggaagcgtccggcgtgaaaccctggtgggcacgccaaaaggccccgtcccttgcggggcggggcctttagtggtggaggtggcgggaattgaacccgcgtcctgacgtaacgaaccagatcttctccgggtgcagctgacattgcggtctactcggctcctgtgctcacgtcagcaagtcacagccaagcccagttcgagaaaagtccctgtcgatccctcgaacgcagatcgacaagcaagccctctaaatgaggccaggatccggacggaaggctacatccgggctgacccttcggtcactgctcaggcagcgagagcgaagtcagtgcgattggtatcggcacttattggtttccagaggacattaacgagatgactctggattctcgacccgcttcttctggaactatcactccagtcgaaaccgatcacccccatgtttctggtcttgcgtattcaattgtactgttcagttgtcacgagggccgcaccgggcagtgcccgcagctccctcatctcctccaacgctaccccatggcccagtattcccgcacgggcgcctacttctcgtcgagcacccggatcggcagcactcgttgcaggacattgcgcgagtccttcccgtccgaggcattgagccccgacaccacgatcagcacgagcgccaatgcggaccagacggcaaagggtatccaccccagcccgagcagggcactgaaccccaccaccagcgcggacacgatggcaatcgcaatctgggtgttgaaggccttggccgcctcccgatgggggtagctgtgtggcttggacagcgcgtagacggccgcggggccaacgatccaggtgaacgcgcccgaccaatgggcggcggccccggcccagcgtccagcacttcgtcgcacttcccggggcacgaccaccgaggggtaggccccgaactgaccgaccacctggctggcgagtcctgccttcacaaagccctcgagtgccgcattgagctcccggcgtgtccgggcgcgcagcaccttgtcgatgcgccgcccgaactcctcgtgggacaggcggccttcggcgtaggcgtcctgcaaatagcgctcactgcgttgacgttgctcttcggtgatgggtgcgtcgagcaggtctcggcccgcagcgccgaatgactccggcgtgaatccggggatcggcgaacctgatggcatcggcatacctcaactctgcccgcagcccctggccaaatccaaggccattgcggcacgggcatgccccattggtcccggatcatcggcactcagtggcggtgccgccgattgcggtcggccaggtcacgctcggcctcacggttcatgtcgcgctcgcggatggtttggcgcttgtcccactcccgcttgcccgtgcccacggcaatctccaccttggcgttgccgtccttgaagtagatcgacaggggcaccagggtgcgcccgcccgaatcgcccagggcgcgctcgaggcgcttgatctcctggcggtgcaggagcagcttgcgcttgcgcatcgccgagtggttgcgccacgtccccagggtgtactcgggaatgttggcattgcgcagccacacctcgttgtcgtcgatggtggcgaaggcgtcaaccagggacgcccgaccatcacgcagggacttcacttctgtgccggtcagcacgatgcccgcttcgaggcgctcgccgatcgaatagtcatgcagcgccttcttgttgcgggcgatcatcttctcgcccttttcacgaggcatcgcagctcccttctctcagcgtgacgcgttcctcttggcgtgacgcgaccaatcaggctagcgaccgcatccttcgcatggcgaatcagcggctgcggccgtgaaccagcccggttgtcaaccctatgcgggctcaccaaccgccggcgccaccgccgccgccaccaccaccggagaagccgccgccaccgaaggcgctaccaccgctgccgaagccggctcccccggagggctccggcacgctgatgcccgaatcgactccgctgagcaccccactggtgaagtaggcgtagcggaagccgaagggatcgccgtagtaccaatagggcgccgtctcggtcaaccgtccctgagcgaccaactgctcgcacaggctggcccaacggtcggcgatgccgaaggcgatggcccagggcaggtactggctgaagatgtcctgcccctcctcgaacttcagctggtcggcctcggcggtcttgaggtactcctcgaacccctgcacctgatctgtataggcgcgacccatggcagtacgggtgccccgccgtgcgatcgacgagcggatgagcagggtgatgatccccacgacgaccagggccccgatcatcatcagcgcagtcagcccggcggcattcgacgccagggccgccgtattgctgagcaatgatccgccgaaccatgccccgatcaacaccacgaagctgccgatgaccgctccgctgcgattggtgcccacctgtccgatgcgcttcatgaggccctgattggttgccgtggcggcgacctcgcgggcgagctcagaactggcgtccgacatggaaccgggatcagacaggttcacctcggtgcccaccgcaacggaaccgaacagagcgtcgagcagcttcttctcatagggcgtggtggccttgtccgcatcgatgaggcgcccgaagagctccgatgagccatgtcggcccgtcgtcgagcgcagctggatggcccgacgcaccgccaggtcaactagggtggccgtcatctcctgggaatcaacctgaccgtccaccagcaggccgccgagcgcgaccgggatctgcggcggatcgaagcgcacgggcaccacgtcatgcttcgaggcgggccccacctgcgcagcatccacgtccaccggcacggtgcccggggggacacccaggaagcgttcgtcagcactgttcttgcggaaccggacgaggtagatggccccgacgatcgcggccgcagccaacgtggcaatgccccatggcgcggcctgggcggcggagctcttggcggcgggttccagctggggcgtgccgttggtgaccaggccgctggcgatgcccacgccgatcgtcatgacctcactgccccgcttcacatcctgttggaagactgcctgctgatccgtcaccgatgacgaggtgcaggcggtattcgacccaacggcgcccgagaagcactggacctgctgggcgccaccgggcaccgcaacagtgatcctgatgtcattcacatccggggtgttgtcccccaccgcatcccagtagagctgttccacgccctgtgcatcgcgcagcgcccccttgacgtcatagctgatcacataggtggcggtggcgctggaaacccgcttgttcgcatcaccgatcttgatcgtcacgaagcgctcgcggggattgcccttggtggcctcatcgctctgggtgaagctcgccggtgcatcgggactcgagacctggacattgctgacgtcgtagacgatgtcctggttcttgttgtcgccgtcgggctcgcgggtcagcagtgtgcggtacatgccatgtcgggccgagtcgctcgcgaagcggtagacgagggtttcccggacgtgggtggtgccgtcagttccgaccgtgtagtcggccgtccacgagtcgaaggaatccgaggtctgtgcgagtgcccgttgcggcgcggcggtcaggcccagggcaaccatcagcagtgccaggaaccccatgagggcggcgcgggcggcgccaccggtgcggcggcgcggcgcggcgcccgggcgaccagcagtcatggcgggacttcccgtcgaatgtgacatcgaacaccttccggtcattgatcggattcacgcatcgcatatcggggggtgcccacgaggcgcaccccagctgcctgcccacggcaaagcagctcgccaacaaacctacggcctcagccgggaatggtggcgagctgttcgcatcaggatcggcgcgtcaggccaccgtgatccagttctggggatcatccgtggcaccgttcacgtacacatggaagtgcaggtggcacccggttgacagcccggtggtgcccacgtagccgatgagctgccccttgtcgacgtgctgaccggcgctcaccacatagctcgacgcatggttgtaaccggtggacaggtagacgccattgaccaggccatggtcgatgaccagccgatttccgtacccgcccgactgtcccggggtgagcacatcggccacggtaccggcggctgcggcgtacatcggcgcattgcagcccgcccccaggtcgagcccatcatggaactcggtgtagcccagcacgggattgatgcgcgtgtggtaggtgtcggtgatgggggccccgggcaccggatcagcaagtacggagctggtcgatgtcgcgatcgaattgcctgcggccgcagcctgggcggcagccgcatccgcctgttgggcggcctgcgcggcggcagctgcagccgcgttacggtccttgatgcgctgcgccactgcattggactgggccttcaggtcggcgttgcgcgcctgcgcatcggcaagtgcctgctcggccaccgacttgtccgccgcgttctggctcaccagcgcatcgaccctggccttggcctcttgggctgcctgggcggtgctggccctgctgttcagggcgtcagcggcggcctgtcggtccctttgggccgctgcctcggcgtccttcatggcctgctcggcctgctcgagcctttgctcaacatcctggaggcgatcgagctcatactgctgggcccggaatgcctggtcagtccactggatgcggttggacatgtcgccggtggacaggttgttgacgaagatcccgatggtgaccaggccactgttctgctgggtggtgtgacgcacatcggtgccgaccttgcgcttctgcgcatccacgtcggcccgggccttcgccgcatcgtcctgcgccttcaccagggccgcctcggcatccttcaatgcacgggcggcatcgtcgtcgctgcgtgccgcggcatcgcgatcggcctcggctctggccaggccggcctgggcgtcggccaactgcagctgggaggctgacagggtcttctcggcgtcctggagcttcgcgtcggaggcatagacatccgaatcgctcgcaccgatctgctgttgcaggctggcctgctggtcctcgaggtcatcggcgccggaaacggccggcatcatggacaacgcgaccgaacaggcgaccagtccgacccatgcccgacggggcagggccattgtgcgcatcgcacctcgggtcttcgcctgcttcacggattggccccttccagagtcaaagaagtaattcacggttcacactctcaaatagcggcgcgttgccacgaaggtgggaatgatcgacaacaggacccccacgacggcgacccagaccacggccaccgcagtgtcaccccaggtgatccagcccaggctctggatggcgagctgggaacgcacccgatcgatcacgaagtactgcagtgctgacatcgaggctgcggcaagcaccacgcccgcgacgccggcgaagagtgcctccaacaggaatggcagcatgatgtagccattggacgcgcccaccagccgcatgatgccgatctcacggcgtcgcgtgtaggcggacatccggatcgtattgccgatctgcagggctgcggccagcaacagcatccccgcaatgcccatcgcaccccacttcaggccgttgaggaccttgaagaaggggtcgagcacactgtgcaggtcctgcaccgcctgcacgcccatcaggccctgcgattcggccaccacgcccttgtagttctggggatccttgagcttcacccggaacgaatcctgcatctggtcgacggtcagggaatccttgatgggattgtccttgtagacccgctggaattcgtcgtaggcctcctgctgggtctcgtagtagatattcgagacatcgggattggcggtgagccgcgaacggatcgcgtcgcgctgcgaggcggtggtgtcctgcccggcctcgcagttgccgccggcggattcggtggcggagtccgcggtgcacaggaagaccgagatctcgatcttgtcgtaccacttgcccttcatctcattgacctgggccatggtcatgaggctggcgccgaacagggccaacgacacccacatggtcacgatgacggcaatggtcatggacagattgcgcttcaggcccgaccaggtctcacgcagcgtgtggcgcatggcggcccatcccatcgttgtttgacaatttcatcggctcacaggttcccgtatgcgccctgcttctggtcgcgtacgagctcgcccttgtcgagctcgatgacgcgacgccgcatctgatcgacgatggtcgaatcatgggtggccatgatcaccgtggtgtcacgacgattgatccgatcgagcagcttcatgatgccgacgctggtggccggatcgagatttccggtgggctcgtcggcaatgaggatcttgggattgttcaccacggcacgcgcaatggcgacgcgctgctgctcgccaccggacaattcctccggtcgacgctcccccttgttggccaggcccacgagctccagggtggcgggcacctgttggcggatctcacgcatgggcctgcccagcacctgcagcgcgaacgcgacgttctggtagacggtctgcccgggcagcagccggaaatcctggaagacggtgccgatctggcggcgcagcgcgggcaccttccagttgtgcaggcgccccaggtccttgccggccacgaacacccggccggtggtgggacggtattcacgaaggatcaggcgcaggaacgtcgatttgcccgagccggaaactccgacgaggaagacgaactcacccttgtcgatgtcgacgctgacatgcctgagggcaggggtcgtctgcctcgggtagagcttcgagacgtcttcgaaagtaatcacgcacagtcctgccgggtgggaaggggaagaacgctgagtgtttctcagcccggacaggggtgagcctattcagtggtgcccaccgatgggcgccgcggcgcgccgggagccgcgctttcccaagatttccccagccccgcaggaggaggcctcaggctgcctgttcctcctggcgacgccaccggatgccacgctcgatgaagccatcaatgtcaccatcgaagacgttgtcggggctgccgctctcgaatccggtgcgcaggtccttaaccatctggtagggatgcagcacataggaacgcatctggctgccccacgagttcccgtctgacttgagggcatccatctcggcctcgcgctcctggcgggcacgttccagcagctttgcctgcagcacgcgcagtcccgcggccttgttctggatctgggaccgctcgttctggcaggtgacgacgatgccggtgggcaggtgggtgatccgcaccgcggagtcggtggtgttgacgccctgaccaccggggccggaggcgtggaacacatcgacccggatgtccttctcgggaatgtcgatgttgtcggtctcctccaccactggcagcacctccacgccggcaaagctggtctggcggcgtccctggttgtcgaaggggctgatgcgcaccaggcggtgcgttccctgctccacggacaacgtgccgtatgcgtagggcgacttcaccgtgaaggtcgcggacttgatgccggcctcctcggcgtagctgatgtcgtagacctcgtagctgtatgcgtgacgctccgcccaccgctcgtacatgcgcagcagcatcgccgcgaagtcggcggcatcgacgcccccggcctccgaacggatggtcaccagtgcgtcgcgctcgtcgtattcgcccgacagcagggtctgcacctcaagggtgtcgatctcatccgccagcgtggcgatttccttctcggcctcctgggccgtgtcggcatcgctctcctcactggcgagctcgagcagcgtgctcgcgtcgtcgaggcgcgaacgcagggtctgcaccttttccacgctggactgcagccgtgacaatcgggacgtcacggactgtgcatgctcctggtcgttccacaggtcgggagccgacgcttcggtttccagctcttcgatctgcttgttcttggcaggcacgtcaacgaccgcttcgatcgagctgagcgacttgttgagctgggaaaggtgttcggttagttcatcgagggccacgatcaggaattctaccgggtcgccctagtgggagaatgaacgctgacaaggcagccgcccggtcgaacgccaacggcagcaatcggaaggaaccatggcagcgctcaaggaccagctcaagaaggatctcgtggtggcgatgaaggcccacgacgagacggccaagacgacaatccggatggccgtggccgccatcatgaacgcggaggtggccggtaaggcccacgagctgagtgacgaggaagagctcaagatcctcacccgcgaggtgcacacccgggaggaatccgccgagacctatgccgcggccggacgcgaggagctcgccgccaaggagagcgccgaggccgaattgctcaagaagtacctgcccgagcagttggacgccgcacagttgcagcagatcgtcgatgacgtggtggcgcaggcatcgaccgatggcaagccgaccatgaagcagatgggccagctggtgcgggcggccaacgagcaggtgaagggccgcgccgagggcaaggccgtcgcagacctggtcaggaaggcgatcaccggctgagcgccctgagccgctagactctcgcaggtcccggctcttcgggcgcatagctcagttggttagagcgcgtgccttacaagcacgatgtcggcggttcgagtccgtctgcgcccacccaaagtgtcttacgggaacacgcgacatcgaaagatgtggtgtgttcccgtaagggttcctctccctcgtcgctgggggtcttgctctcgcggatgatggtggcgaacggctcggccaggcgcggacgtagttgctcgtcatcggtgatgtcgaggcgggtgtagaacgcctggttcgccagccgccggtcggcatcacctgaacgagcgtaggcacggtgcgcgtcggtgagcagccgcagcgagtcgtgcaggaacgcgcgtccgccggtgtggtgctcatcgtgctcggcaaggcgctggttcacgtcggacaggcccgcccggatgcggtcttgatgccgcttcaaggtcggcaggtcaatcgcgtcggcgaagtgcgcggccagcagcttgtcgctctccgactccaacttggcccggttcgccatgaggtcggcgatctcctggtcgcggcccgccatgcgcttgtcgaacgccgcgtccacccgcttggcgaggtcgcggtaggtgtcgtcgctgatcgtgatggaggcgtaggagtccgcgacgagacgttccgcgaccgcgaccggaaccgcccgcctcgtgcagctcgtcttcttggcggcgcggccggagcagacgaagtaggcgtaggtggtgccgcgcgggttggtggcgaagtcgaggagcatccgcgacccgcaggtgccgcagtacaacaggcctttgaggtgatgggcgtgctgcacatgccgggtctgcttcgcggtccgcgctttcagtagcgactgcacctgatcgaacagcgccgcttccacgatgggctcgtgcgcaccgggatacagggcgcccttgtaccggatcagcccggcgtagtacgggttcgtcagcagcttgtagagcgtgttcttccccagcggcttgctcgggcgcttcggcgtcggcaccgtgatcaagccgcgtgcggtgaggtcgcgcagcagcccggtcaccgaggtctcaccctcggcataatgctcgaacgcccaccggatcagcggcgcacgctcggggtcgacctcaacggttctgatttcgcggccgttctcatccgtcttgcggacgttgaggtaaccgatgggggcgcgcatcggggtgccgccctgggcgatcttctgcgataggcccttggacacttcggtggcgaggttgcggctgtagaactccgcgatggacgacatgatgccgtgcacgagcatccccgagggcgtctggtcgatcgactccgtagccgacaccaatgtcacgcccgcagacagcagtgcttggtggatggtcacgtcgtcggcgcggttgcgggcgagccggtcgagcttgtgcacgatgcagaactgcacccgagacgcagcgatgaacggcagcatctctttcaggccgtcacgatccgccgagcgtgccgactcgcctgcgtccacgaactcgtgcacgatccgcgccccgagttcgtcggccttgcgctggttggcctcacgctgggcggggatcgagaacccctcgtcagtgccgccacgctcggcctgctcgcgcgtggagacacgtagataggatacggccagcagcaccggcttgtcgcctgtccagccgtcggtgacgcctgccggggcgagggcgggagcggtgatggtgctcatgcggtgctccttcgttggtgcggttgctctgcttctactctgcctcgttcgtctgacaccggcccgagtccatcaggtgccgggaggtcgtaggggtcgggttccccggcgcggtgcgcgtcgtagcgggcctgggtgatgttcagcacccactccaccaatttgcgcatgtctggttcctcccgtcgctccgcccgcagtcgcaactgaggcggatcgttgcccttgcctgttccgagcgcacccctgctctgcgccgcgcgtcgcggcgactcatcactcgtgcgtcggggccggtcgctcatctctatctcacgtcgtggctgatacgtgagttatagagtagcacacacatggcgtagcggccattgcatgaggtcatgtaggattgggagcatgatcgagggcttggaaagtgtgccgctgctggtcgcggcggacttgcctgcgggctggcagatgcccgacgcctcgcccatcgaccccgaacgcgacagccccgcgatcgacgcggcactcaggtatgagcagtgggtcgatcccgcgccggggctggatcgcaggctgaactccagccacaacaacaccgactccgggcgctggttcctcatccagcacaccgagtcgtccactcgtgtgctgctgcgcctgcaacgccaatacctgctggacgaggaacccaagggcgaggtgcggatcaccgggatcgtctacctgcccgagtgggcaggcgatcccgtggcgagcccgatgctccgcaacctgcccacgtcgcggatcgaggcggcgatcaaccgccgccagttcgccgtcaccggagccagccggttcgagggcggcaccatgaccatgccgtcgggtcgcgtcctccgctcggcggatgtgatgaagccgttggggaacccgaagcgcaccccggacttctacgaggtcgttgccctccagcacacccgcctcgtagacgacggcgaaccgaacccgaccgcgagaatggccgagctcagccgcgtgccgctctcgaccgcgcagggctgggtcgcccgcgcccgccgcaaaggactgctcccacccggacgccgaggccgcgccggataaggcccgcatgacgagctgggcggttgacgacgcgggcgtggtacgcctgccggacggtcgtctgatccgtggcacaggtgcgcgtcggcctcgcggtcaggccccggcccctgagttcgccgtctacctcctgggccgcgaccctcgcgtggccgactggccctaccgctgggtcaggtggcccgacttccgcctgcctgcctccaccgaggacgccgtagacgcgctcagggaagctcacacgcgggccgcgtccgagcgagtcgagattgcctgcggcggcgggatcggcagaaccggaaccgccctcggggtgctcgccgtgatgagcggcgttccagccgacaccgccgtggagtgggtgcgaacaaactaccacccccgagccgtcgagacacgccgccaacgcgcctggatcgccaccgtcgcatcctccctctcctgacaccaagcccccgcccctcgccgcactcgcgagcgcacccgctcgccaccccccccagcgctcccaaccgctcgccacaccccccccggttctcgcccttatctcagtgaatgaacgtaatctaagtgacgtagttgctgctacgctagatggtgagtagggcagacgcaagggtggtggtcgagatgcagggcggcgtgatcccgttccggggcaccggagccgacgcgctgcgctacgtcgaggccgactgttcccgcgctgacgactactacctgggcgcggaagcgaccgtcgcgcagttcgcggcactcgacggatcgggcgaggtgaccgctgagctggcgcttgatcctgtggggtatgcgaggtgggtggactgggagaacccgctcacgggcgagtcgatgggcaaaccgcgccgggcggggtcggatcggcgaggctcgccccggttcatggagatggtcatcaacacgcccaagagcttgtcgatcgccgccgccctgcaccccgaggtctcggaggtgctggatgcggcgcaacaggatgccctcagcgagattcggcgctggctcgcccagcactccgtgactcgtgtcgggccgttgggggcgcaggaggtcgtacccatcgagagcatgcaggtcgtgggcatcacgcaccgcacgtcgcgggcgggtgatccgcaccggcatattcatatgcagatcggcatgagagtgtgggcggcgggcaagtggcggggcttgaacggcgctgcgctgttcaagcagcagggcgcgatccgcgccctcggcaccgccgtgatcgccgcccaccccgacctcgccgccgtgctcgaccggcacggcctgaccctcgaccccgccgccggcgaagtcgccgagttggagcggttcaacgcgctcatgtcgaagcggggcgagcaggtgcgcaagaatctcgaacgcctcgaatccgaatgggatcaagcgcaccccggcgagaagatcgggccggtcgtcgcctcccgcctgcgcgccgaggcgtgggcgtatgagcgacccgcgaagaagcccaccaccctgcgggaggaagccgcatgggtgaccgagctgcgcgaagccgtatacgaccccgaacgggtcgaacgcaagactgcgcaacccccagtgctgcttgaagacctcagcatgcaacaggtcgcgtcgcgggcgctggatcggtgcgccgctagtgcgtcggcatggacgccgcacactgtggaggaacatgtcacccggatcacgaccgaggcaggcgtgcaggccacaccgcaggagttgcgcgagttcgtgagcctcgcaaccgatcttgcggtatcggattgcttctccatcctgccgcctggcgcagctgcaccggagtacgtcgcccacctgaccagcgtcggcgtggtcgccgctgagaccgcgctgcgcgaccagctcaccgccgcaaccctgcgccgggagccgaaaccagcggacgtgaccgaggccgcacacaccgccgggctcgatgaggggcagacggtcgccgccgctgcggtcgcctcgaaagatccgctggtgatcgtggagggtgcagccggggccgggaagaccacgatgctcggcggcgccatcgaggtcgccgccgagcagggcagggcgtcgcgggtggttgcgccgacgctgcgggcggcgcaggtcgcgcacgacgaactcggcgtacccgccaccagtgttggggcgctggtgtatgcgcatgggtggcggtggaacgccgacggcgtatggacacgcctcacgcggggcgataccgaccctgagaccgggcgcgcattcaccggcccaccgcgagaaacggtgctgtcgcggggtgagcgggtgatcgtcgacgaggccgggatgctcgaccaagacaccgcccacgccctcctcaccatcactgccgaagcaaacgcgacggttgcgctcgtcggcgaccgcgcccaactccccgccgtcgggcgcggcggtgtgctcgacattgccgcacagatcaggggccgtacctacgatatgagcgagctgcatcgcttcaccgatgcccagtacgcggcgctcacgctggcgatgcgagaccgcgagaaccccggcgaggtgttcgaccggctcgccgctatgaagctcgtgacgttgcatgcggacgacgagcaggcccgcgaccacatcaccgtcagcacccgcgcccgcgacggcgacggcgacggcgaggcgatcacggtgtcgaccaatgacgaggcggcggcgttgaatgagcgcatccgcgccggacggatcgagcgtggcgaggtcgacgacacggtgacggagaccggcagcgacgggctgagcatcggggccggtgacctgatccagacccgcaagaacaacagtgatcttggggtggcgaaccggcagcagtggatcgtgcagcacgtcgagagcgacggcacggtctacgcgcgtgaggtcggcagcgggcgcaagagcccgcgcaccgttgccctgcctgccgagtatttgggtgagcatgcgcacctgtcctacgccgccaccgcctacggcgtccaaggcgccaccgtcgatgcctcgcacacggtgctgtcggaggcgacgagcgcggcgggcgtctacgtcggcatgacccgaggccgcaacacgaaccggctccacgtcgtcgcggaagacctcgcggatgcgcgggcgcagttcatcgacgcgatggaacgcgaccccgcagaccggggcctcgaccacgccgcccacgccgcacaagaagccgtgcgcggcctcgtcaacgacggccccgtgcggctcgtcaccgaagaactcgcccgcctcgaccacgaagccgaacgcgcacaacggacggcggcacgatgggagcagatcgccgccaggctcgacgcccaacgctccacccaccgcgccgaggacgacgagagtgctgctgtactccgcaaggccgaagaagtcgccgagcaggtgcgcgccgaggccgccaggccgctcaccgtccaagccgagcacgacggggccgcctacctcgccgccgtggagaacgaggccgctacaagcgcccgcctcgccaccgtgggcaggttcggcaggcgcaaagcccgtactgagcaccgcgccgcgaccgaacacacgcaggagctgcgtggacaggtcagcagcgaatggggcaccaccccgacctacgccgattgtctcccggcatgggcgagcagggccgccgagaagcgtgcagagaccgatcctcgcgtggccgaggctgtgcagaccgtcgccgccgcgactgccaaccgtgaggcgatgcgggaacgccatgagcaggagcgtctggcgttgctggtcagcgagtacgggccacagcaggcccgccgcgaccagctcggcattcgcaccaccagcccccaccgcaaggctcgcgacaccagaaaccggggcgccatgactcgggccgaagccgaccaactccgtagcctgcccgcgaacgaagccgccgaacgcatcgaagccaagcgcgccgagcaggagcaagcgcggcagcgagtcgcagagcgggcacagcggcttcccgacccattcgcgcacgacacccaccgcagcgggccgcaccgcgaggggccgacacgcagcctatagaccacggtaggcaggcaggctgctcacggcgcagttcctcgggtcggcaagcacaagaccaggagcggggcggatgatctaccgccaggtagcaatacgtccattcgggagatagcacaatgggagaatgtagaaacaggcgaagagtcatggcgaagagaatcagaagacgaggcagcgcttgatcggcaacggtcgtaaagttgcggtgttcagcgcagaagacgcagtagctttgtctgcatcgagtacggcgtgtcgtgcgcgatgcatgcgcctgtcacgaagtcggggccgctgcaccgctggggaacgcgttagtcctttcatgcggaaccttggtttctcgggaaactctgctggtagaactgctgcattcatgtcacgcgttgattctgaccccagcgtgcccgaactcgttgccacagggactgggggcgaggcttatcttgtggctcagccgtggtcgccggctttctgtgagtcttgccagttccttcttttgccctcagatggagcgtatggtggggaatatgtggacagttcttctcatcttgcttgtggtatgggcggtgctgtcgatcgtagggttcgtgttcgagggcctgctctggttggccatcatcggaatcgtgctcttcgtcggcaccctgatattcgggctgctccggcaacgcgcgaagcgctcgaaagcataacccgcctctccctcacgtggctcagcgggggatgctcttctgcggcatgtcgtgcgtaccgcacgccccagcattgcttgcttgcttgcgatcagtcagttcaccgggcaacacggacttgcaacgctccgggtctgattccgacgttgacgcgggttacgtggccgaagctgtctccgtcgagttcaatcaggtgcggggtatcgaaccgtgcctcgaactgtctccccccggacataggcaagcgcgtgaatatccggcgctcgttcaagcatgcgccggctgagccgggagcgccgtgcgatgccctgcagcgtgaggcgcgtgccgatccgagcccacccgaaccgtcctttcggtcgcatcatgaccacgtcgaggaatccgtcatcgatgaccgcgccggggatcaggagcatgtttccggtgagcgtgccgcagttgcccacgatgaccgtgtgcgctcgagtggatctgactctgttctggtccacacggtagtcgaggtggaagagcctgttgacgatgaccgatctggcgatgggcgtgacgtacgcgagccagccgaggtgcttcttcgcgatcgagctcgtgtgctccgccatctccgcatccaggccgatacccgccatgacgacgaaagcatgccgtcgtgaagcgccgtcagcatcgtcgaactcggcgaccccgacatccacggctcgcgtcgagcccgtgaacgccgcctcgatgttgccctcgacatcgccgagggagataccgaggtcgcgcgccagtaggttccccgtaccggtggggatcggtgcgatgggaatcccggagctgtggacgacgtctgcgacggcccggacggtgccgtcgccaccggccacgatgatgactgccgggtcacccgccagggcttgctctgccgcggcgcgtccggaatcctgtgcgttggtcttgtaccagcgtgaagctgcccagcccagcgctcgctcctgcatctctactgcagcacggacgcgctccagtgggatcttcgccgggtgatagaccacggcggcatgtgaccgcctcaccgtcccgtctgcgcgaggaaacttcacgatgctgctggcatcgtgaagtgattgcgctgttcgatgagcgggcaggtgaacacgtcgcgttccccgagcccgacacggttgatgtagcgcacgacgatggcgtacgaggcgaacaatcccgtctgcagatacgggacatcgtgggttcggcagtactcggcgatgatcggtgctgccttgcgcagatgcgggcgaggcattgagggaaacaagtggtgttcgatctgatagttcaggccacccatagcagtatcgagaacacgggtaccgcggatgttccggctcatcatcacctggcgtcgcaggaaatcgaggctcacgtctctcggcacgaccggcatccccttatggttcggcgcgaacgaggctcccatatagaacccgaacacgccgagctgcacggcgaggaacacgaacgcgattcccggcgagagcacgatgaacaccagcaccgggaacccggtcagccggatcagcagaaagaggatctccacccagcgccgcttcagctcaccccttgcgagcactcggcgcaccccggacgcgtgcaacgacaccccttccaggagcaggatcgggaagaagaacacgccctgatgcgcccgaagccatctcagcgtccggcctttcggaggtgttcgacccggagtgacgatgatcactggaaggtcgatgtcaggggcggcacccaacttgttcgggtttgcatggtggcgtgtgtgcttgtgctgccaccacccgtagctcctaccgaccaggaggtcgccgaggacgatgctgacccagtcgttccatttccccgacacgaagatctggcgatgcgcggaatcgtggccgaggaacgcgatctgggtgaagaggatcgcgaggagcgccgcggtgaacagttgccaccaggtatcaccgatccaaacgaacgcgaataagccgccggcgaggaccaggggcagcccgaccagcttcgtccagtagtacccgtaccggcgacgcagcagcccctgttctcggatcgttttcgccaatgtcgtgaactcgctcccgcccttgccattgactggccggctagttcgtggagtccgggtcgaacgatactcgttcatgatgcacctgagatcctgcgggcttgggcgtcaggaacgtccgtgaccgccctcatcagtccagtcattgatctgagcgcgatccgaccggacacggttcgcctccgctcccgccgaatcctgaccagttggggatggggcgaaagtgacggattccgcgagagcggtgaccgcggcggtgcgcgcgttctcgctcacagccgcgttctggaacacgaccgccgccgcgtcctgtcgatcccggacccctgcgctgatgtcggccaggcaatccgcgagaacgctcgcgagtccgtcgcgcaattcctcgaggttcgtgttcgcgatctcgaggcgacggtccgagatcgtcacctccacggtcggatagccggctttcgcgagaaagtcacgggtctcgctccccagaatctcgatcacctcgtcccgttcggggcgtcgcgtgaacacggcctcgaccgtgtatcgatccggggcctcatcggttcatcagcgcggcaggcaacgaacccaccagcaccgatcccaggcccagcgtagcggtctctacaccgctggttcgtgtctgtgtctccatgatctgacgttacgccctctacatgtacgcctcacagcttcggcaaccctgtcaatggagcggacggagaggccacgctcaagactattcatctaggtccaagtgccttgcggcgctcgagttcagcgtgaccgcacgagaccggtgcggcggccatcacagcgtcgcgggcgtctcttcacagttcgtcgaagctgaacgcctcgcacacgggcgagctacgcggacaacatgaatgcaaatgagaacgcccccgagaaggaaccggatcatcgaagaatcgcgcggaagcgagcggaacgatgggaacgcgcgatgcagggctctgggcacgcatacacgccgaccgaagagaccacgcgccgccggaactccgagatcatccgcgatcaacaggagaacgaccgcaccgaggaactgaggcaagagggagcaggcgactccatagacactactcgtcggtagcgctgactcttgcgctgaacgcaggaaaggttttgctgccccgcgtatctcatccgcctccgcgcgaggactatgatgtgagtccggcgctgccggaggtgctatcgacagcctcgacgagcgcctcagcaggctcagcgcaggcgcgtcgtgatggggtctgctgcggagtgtgttgatttgcgccgggctgtgcggcggcttcagccttgaggcgagatttcagtcggcatcactaggctcgccgtcgacgttcgtcgggacgcgaggtctctggggccatcgtcgatgtggacgacagtgaggcggatctccacaggggcacagccacgaccggtacacagcgcggcaatcgctgcgtgtactcggcgactggtttcagcagctcccgcggcggcgagcacgcctatcgcggcctctgctcgcgggccgtccggcgtatgctcccagcggacaagcggtgctacgttcggctgagctccgaggagctgagcgccggcatcgaccactttcgagatgatgccgccagtgcggaagatcgaagccacaccgggaacagccctgatcgcagtctcgatgtcctcggccattgcctggtccgtcggctcggtcatcggtttccttctgtccggttctgaagctgctggatatcgtgcacggtgatgtcaatgctggtcacgttcagagtggtgtgtgtcatcacacgtgcactgatctcagtgcggaggcgttctgcaagatccgggatcggttcgccgtagggcacgctgacatcgacgcggacccgcaccggttcgcccggcaccgtaacatctccgtcgaatcggcatttgccgataactacgccgggcacggtgtgctccgccgcgcggatcacgccccggacggcaccctcggtgatgcccaagtcggcttcgagcgcgggcgctggcagtgggatgcgccgtccggcgcgcgcgtccagagtgatgccggcgaggatgctctgcacccaggtgtcgtcgggctccggttccgccgaagtgtcggctgcaaggagctcgggggtgacctctcgaagacgggtcagggcatccagtgcgatgcggcaaccgggcgagccttcgatcgaagcatccaccggggtgcgcccggcatcgaggtagtcagagagcttttcaatggtgtgcccgtcgaggtcctcgaactcggtcacgcggccccgcggatcaagggtatcgtgttcgttcatcgccactgctccattcgaacaatgatgtcttttcgtgcacgggcgagcaatccccgaaccgtcgataccgggaggtccagttcttgggcgatctcctcgtagctatagtcgcccagctctcgcagcacccagcattcacgctgggcgtcgggaagccgattgatcgcgtcgctcaacgccgcgatccctgctcgcgcttccgctcgtcgcggcggggccatctgatccggtgccggtagctctgtctcgctcagatcggagtggggtcgggtggatcggatgcggtcgatcgctttgcggctggtgatccgcacaagccagctcttcacccgcccgggatcatccagcttcgggagctggtcccaggcggtgatgaacgcgtcttggacgacgtcgtcgacatccgcgctgcccggaaggatccgccgcgtgtaagcacgcatcaacggggtgtacctgcgaacaagcgcggcgaatgctgccgtgtctccgtctgcggcgcgtccggcgatgatccggtcgtccgctgactccaacgggttgcggtaaggctcactgctcatccttcatccccctgacaccaagggcgcctctccttcgagggccaacgggcggtgcgacgaccgcccgttttccctcatccttacccgtatccgtcagttcgtccatggcttgtgaggttgggtcacttcttcgcgcggcgaccggtgatcaggccatagatgagcaacaccaggatcgatccgccgatcgcgagcagccaggtcgacaggttgaagaagccctgcaggttgacgttgaagatgaggccgccgagccagcccccgagcatcgccccgacaacaccgagcagcagggtgacgaaccagccgccgccttgcttgccggggaggatgagcttggcgatcgcgccggcgatcagcccgagaatgagaaaactaaagaggctcttcacgaacgagggtgtagcgcgggtctgaatccgccggcttcgagcagcgaccgagcgatgtagtggctgaggttgcggaagccgagggccgtgccgcggaggtgttcgagtcggccgttgatcgcttcggtggggccgttgctggtgccggggcggtcgaagtagccgagcacgtccgaagcgcgctgtgtgagggtgcgggcgagtttgcggatctcgacgagctgctccgggacgctggcgctgatcttgtcgatcgtgtgcgcgaggaagaatctgcccaggccgcggtccttgtcccggtaggcggtgatcatgtcttggtagatgccccacgtcgcttcgacctcgacgtgcctgtcctcggcgaacagggcatctagccgcgcctgctgcttgtcggtgagcagaccggcaccggtgagcagggtccgtctggcctggtagagcggctcttcacgattgagggtgtagttggggtctgaatcctccggcctcgaggagactgcgggcaatgtagttcgtcaggtttcggaagcccaaggctgagccgcgcaggtgttccagtcggccattgagggcttctgtcgggccgttggaggtgtgggggcgctcgaagtaggccaggacgtctgtggcgcgccgcttgagggtgcgccccagggtgatgatctcagcgagggcggcgggaacgccgcggctgatgacctcgatgacgtgggccagctgggctcgcccggccttggggtcgggatcgcggtaggcggccacgatcttctggtagatgccccaggtggcttccaccccgacgtgagcgtcctgggcgaagacgccctccaggcgggtgcgttgcttgtctgtgaggagatccatcccggtgtgcagggtcttgcgcaccccgtacagggggtccccggaccggcctcgatgtccggtggtgtcttgctggacgcgctggcggcagtggtccagggcatcgccggcgagctggacgacgtggaagggatccatgacctccaccgcgtcggggagttcttccttcgctgcggtcttgaacccggtgaagccgtccatggcgaccacctcaatccggtcgcgccacgcagggtcttgctggctgagccactccttgaaggccttcttggagcggccctccaccatgtccaacaacctggcaggaccccttccctcgcgcagcggggtgaggtcgatgatcacggtgacgaacttgtcgcccctgcgcgtgtgccgccacacgtgctcgtccaccccgatcgtggtcacaccctcgaagcgatgctcatcgttgatgaggaccctgcgtccctcctccaggacggaggtgttggcgcagtcccaggacacgcccagaccctcagcgacccgggcgacggtgaggtgttggacgacgatgccttccagggcccaacgcagtccgccccgggacagtttcgagcgcggctgggccgccccagtggtgtcctgcctccacacacgcccacaccccgaacagcggtagcgacgcactcgcaccaccagtgtcaccggtctccagcccgagggctcgtgggcgaggcgacggaccacggtgtcgcgggggatcccttcgcacccacactcgcgacaccaccggtcatcgtccaccacccggcaggccacctcgcagcgatccgggaggactctctggcccaccaccacgaggccgaggtcatccaggcgggcgaacgtggtcagatcgggggcagcaaaggtagcgtgggacacgtcggggtctttcagatgggcagcgtaggaactcccatcatcggaagaccccgaccctcacacccaccccgacacgccagccagactcaaccccccgctacaccccggatcgcgaagagccactaaagaagcccatgagagcagtcctttcgaatgagagaaacggggtgaccgaggtgggcaagcccaccccggtggcgtggttactttttgaacatctccttgacgtcctcgaccttgtctctgatggttcccttcgcctggtccgctttgccttcggcgacgagcttgtcatcgtcggtcgctttgccgacggtctccttcacctgaccggtgaccttgtcggctgcggccttgatcttgtctccagcactcatcgtgtgatttcctttcattctctggaacgctcccgtggtctgggagcgaggttctggggcagccccttgctgctcttgtgccttagctgccgagaaagttcttgcgtgccttctcgagcgactttttggcgttcttcgccatgcgcttgcgtgacttcttcgcttctgggttcgtccagagccgttcgagctggtgtcgcaggtcctcgtaattcttcccgcgcgcttttgccgactccacgccgaccagataggcggcgacagcgatcaccgcaagtatcaggatgttcttccgcatcgattgttcctttcgtcaagccctggtaacgcgggggtcagttcactcgggattggtctgccgcgagccgcgagcggatcccggaatggatcgtcacgatcgtcgatacatcccgccccagtaaggtcgccaggcggtcgacgagtcctgtcaccgtttcggcgacctcggcaggtgagacgttctgcctcggcgtgacgctcacatggaggacatcggcgccccacagtctgcgggcgttcactttcgaggagaggatctcttcacgcgactcgagggatcgggtgatcgcgtcggccgcgaatccatgacggatcgtgaccgacccttgtgccccggtcccggcctcttcgcggatcaccacgatgcttcgtccaccacccagccgggcgatgacgatcaccgcgatgaccaccatcagcgccagcagagcgaggatcgccagagtgaaccagctcaccgtagtcgcttccgaaatgcgtgacgcctgatccgcgctcaccatccagtccaccccggtcgatgaccagctcttccagaggtcgccggcaacgggccacaacatggccatcaccgttgcaccgccaacgccgatcagcagaacgccgacgatgaagaggaccgctcggttcacgcctcggttcgtggcattcatgacagaccttccacatctgcggcgcgcaggactcgtgcccgcacctttacacggggcgacaactcgtaaccggccagttccgactcggccaccgcgcgtacatgacgcctatcgacggcttgtccgggctctggcctgacggtgatatccgcactgcggtgaccgacacctacgacgacagcgcctttggcgagatccagttcacgccgcacccgctcagcgaccgacgacgcgatcactccgttgtctacgatcaccgcatacgaggaggatccgagttgatgcttcggtctccggcctgggccgagggcgagccagacgagaaccagcccggccaccagcgcgatgagtcctcctgcaatgatcaggctcggaggttggtctggcagatcctgcagccaggtcagcgctgcccctggtgcgaccagcaacgggccgatgccgaggagacgtaagacgatctcgattcccacgtagatcgcggccaatgcgacgagaacaaggagaatcacggtggcgacggtgcgcggagagtgcgtctctcggcgcacgacacgttttagcacggcattcgtcatctacctcacccgacttcgcttcgggatgatcgctcccgtgacggtgaacgacacacggcggatgtcccgtcctgtcaaacgcgcgaactcttcagcgagttcggcctgaagcgcacgaacccgctcgagaaccggcaccgcagcctcgatcgcttcgatatcgctgagatcggggacgggcagtttcgccgcgattcgcacggaaagacctccgccccattcagccgcctcgacgctcacgtcgtctcgagacacaccgatcgcgaccgctgacgcttcccgaacaaccttgtcgatgacgcgttcatgcacccgaacgctcccaggcgccgacgaaacaacatcaggtgtgctcgcaatgctcggggatgcaacggtcagcacgctcatgacgaggttcgcctccccgtgaatgcgctagcgagcgcgcggaggtccagctgacccgacaacactcgcccggtcaaagcaccgatcaccatgagcagcacgaccagcagaaatccccagaacccgaagatcagcgcagcgaaagccagcactgcgccgaccagcgccccggtcagcgtcgcactcatgagacgcgcgactcggtgtcgtcgtcagcgtcgtcgatcggcaggtgcacatcattcacgtcgatattgacctcgacaacctgcaaaccgaccagacgagtgatcgccgcggtcaccgcactgcgcacgttatcggcgacctcctggatcggcaccggatagtcgaccacgatcgtaatatccgcggcagcctgcgtctcgccgacctcgaccttcacgccctgcgtgagatccgtcgcgttcaccgcgtcacggatagcaccgaatgcacgcgccccttcgccgccaagcgcatgcacccccgaaacctcacgggcagcgatgcccgcgaccttggcgaccacgccctcggcgatcgtcgtccgtcccgccgaagcactctcctccatcggaagacgcggtaccgcaggcgcacgatccactcgcgacgagcccgcagcccctgcgcttcgcggcaccgatgcgccgccctcagaagcaacagtcttgttcatctcatccgtagccatcagaactacctccacaatccagcagcacgaccgctggccgcaccatccaacgagcgaagaacaacgctctacacataagacggcacccgaccgccgaacgtcacaaaatctttgtgacgggccggaaacttgtcgacagcgagcccgatgattcgagaacccattctgtggctgatgaaggtcgaacgtcccgtctgcttctccccgcggagtcagatggaaagatcttcacaccttcgtttgcctgtccggatgcgaagggtcctcggcctcgcggttcagatccgacacattcaccgcctcgatacggtcactcacttgcagcgccgtcttgctgttcttgatctcgtgcgagctcagcttgtcgacggacaacggtggctggagacggggcgtatgcgtgtccagactcgcgtacttcgcgctcccaccgctcgatccactcgccacgggttggatagtcacactcggcgataccgggcattgatgggacactcgaacggatcacgagccgagagaccgacacggttcaggtagtcaatgacgatcgcgtaagaacgacccagtgatgtctcggtgtacgggacgcccagttcccggcagtgttcgcggacgatacgccgcgcgcgcgaaagaaacgggcgggacatgctcgggaacaggtgatgttcgacctggtagttgaggccgcccatgagcgaagtcgcccaccacccaccccgaatgttccgcgaggtacgcacctgcttcgtgaagaagtcgagcttcgcgtcgtgagcgatcaccggcatccctttgtgattgggggcgaaagaggctcccatatacacgccgaagaccgcgacttgaatccccaggaacgcgaaagccatacctataggaagcaagaggaagagcggggtgatcaggagggcgaaccgcgcggcgatgatggcaagctcgatccagcgcccttttaccggttccctgctcagaaggtggcggaggctgtggaagtggaggttcagcccctctaatgtgagcagagggaagaagaaccagccttgtcgcttcgtgatagcgcgccgcaaccctctcgcctggaccgcgtcttcttcgaggaacgagatggtatcgacctggatatcgggatccttgcccactcggttcgggttggagtggtggcggctatgcttggagtcccaccaggagtagctcattccgatggccccggcgaggacgcgcgcaagacgatcgtttgccggaccgagggagaggatctgccggtgcgccgcttcgtgggcgagaaacgcgatctgcgtgaagacgatacccagagctcccgcgatgaggagctggaaccagctctctcccagcagaacgaatccggctatcgtgccgccgagagcgatcacgagaaccagtccgaccagaacgtagaaccagggcgcccgacgcaggagacccgcatccctcacctgctgcgagacccgcgtataagccttcgctatcggcggaaagtccccggcacgggcgcgagtcgcgcgtacggggccgagaccgttgagttcttgtatcttggttaccggcatgggcggtacctgcttccatcacgagcacttctgaggcgaggcccttgtggagctacggcatttgccgatcgctactctgacgatagttcaccaacccggtgttcccctgtacgccgccgcgaatcacgatgtcgaagtccgttcctgccataggtgaaggcatgcaccgggatcgtcgccgaaggctgggtggagaacacgttggactattgccagacgcacagaccttgaccgagatggttgtcttccgtgttcagccacaatcgtcactggccggtgcgggtctcgtctcaggcctacgaactgggccacgctcgatatcgtgtgagctgcgaaaagtgctaacgaaagtgctaagcactctgtagttcggagtatcgccgtggagttacccacaggccacacgtcgtagatcgttgatttaatgcagcagaacggcctaccgagattctcgacgcgagggggtcgaggacagttcaactcccgcgtcgccgtcgggttcatcaccgcgtcttcgcccacaccgtgccccggtgcaccccgaactgacgagccacggccttcacgctgatgccctgtgcgcgggctgttcgcatagcgtccatttcctcgtcggtcaggcgtgttcgaggtcgtttctttggttccgccgacacgccgatcaacgggtcgtcggcctcgccgtcggactctgcatccgcgcaaaccccttgattccacgcggaaaccagcctctcgacccgaggtcgcctgttcccgcaacgctccattgcttccaccccctgacttcgtcgaagcaccccgtctaccttgcgaccacaggtcttcttgttgccgatagcggttccacaacgcaggacgcaaagaatgactcactacccaccgggtccggaactccacggccacaacagataatcgggatccgcacgaactccctccgctcaccaaggcgcagcatttcggaaagctcggcagccccaaacaaggatgcccccaccgaaagcatcccttgcgggcactgttaacccagacatagatgctgcccatcgtgatccatgatggagcgaacaatcacaccataacagttcgcgccacgactccttgaggacttttttcgagggatcatcccagaactatatacagagtaacgcaaggactctcatcacccccgaaaggatataatatatgccggaaagctatttgaacctccggagcacggaggagtggcctggagtgtggtggctaccagacaggccggacaagcaggtcccaggaaccctacattacgccccaaacggcacactcaccctgacgctcattggcggatttgaagatggtctctttgacccagagatccaaggtcgcattaccagtcatgacgagagaacttcatggaaggccatatggggcgcagtaagaaaccaagaactgaccatcctcgattgcatatccgtcgcttctcaacgtcggctatcgtccgcgcccaatacccctgaacgtcaaaccatccttgcgacttcagccctgataggatcacacacccacaacgagaacgaaacagtcttttctcagtgcgaaatatcagtggaaaaccttaaccaatgggcagcttccccagccttcaccttttcatgggaattgctctcagatgatcgccccaacggacatggaggcatcgaagtagcccctccggaggagccttctgtagacattcatcatgcgaaatggacgcttgctcacgttctcacgcttccgaccatcgattatttcaggggttcaaccgtcgcgcgcacgtccgagacagccatcgtgcgagtaactcccgaccaaccctgcacattgaatgacgccctacgattcacgcgactcctgcaggatctggtgtcgctagccacacaccgtgccgccggggttatctggctccgcctaacaatccccgccgctcgatcctccgaagacaacaacttccacatcctcaaccgagacgtcaatgtgctctatagtccagcccgagtcgggatcgataacgaaaaagaggtggagccacaccgcgtgtttttcacttgccaggaccttccttttacaacaattatgcctcgttggatcgagctccacgagaggctgctagctgcctcaaatatcattctcgggctgcgttatgcccccgcagagtacgtcgagaacaatcttcttacgatagtcagtgcagctgaagtgttgcaccgtgaacttaagcttggtaagcagccaatcccgaatgaagcgttcaagaccatgcgtgattcaatgcttgatcagattcccaacaaacaccatccacgacccaaaggaaacattcgaaacaagtcaactcttcgagaacgacttcacgacatcgtcaatcttctcgaccccagcgtggtggctgaattgatacctgatgtaaaaacgtgggcacgcaacaccgcaattgctcgaaacagtctggcgcatgagggcaagacgcccggcaagccccctgaagagttgatggcaatcgttaactccaccactgcaattttacttttcgtcgtattggataatctcggattatctacacaaaagcaacgcaaagtggcgcgcgatcacccaaatttcagagccatagcccaacaatcacaaaagtggctaagtgaccctcgtggctaattgtattaatatccgtcaagtcctcctgacacgattgccaatcagacatattgcccggcgagttccagcgccgacgcggtgtagccacccccgaagagcaccgcgtgcatgatgatcatcgtcagctggtggagtgcgatgcgttcctgccagcccgcggccaacgccgactcggcgtcatagcccgcatagacctccgacaggcgggggaagccgaagacggacaaggccgccaggtcggtctcggcgtggccgccgtgcgccatcggatcgatcagggtggcgccggtggctcccccgtcatacatcgcgttgccggcccacaggtcgccgtgcaggcgcgccaccgactgcccccgggcctggagcagggcgggttggggcacatcgaagtcccccctgcgaaggcgacgcgagacggcgtcgaaggtcctggcctgatcggagttgatcgtgccggcatcgcgcaggcaccgcgcaaagacgtcgatgcggtattgcgcatagaactcaccccaggtggccggtgcctgtcgctggtcggtgatcaagggggtccgcgagcgtcccacccagtcaggtccgggccatccggcgggcggcgctccccaccacggcgcacccgccgcatgcatgtgggccaggctggcgcccatcagggcggcatcgcgcgatgtgggcgagctctcctggacccgcccgatgacgagttcctgccgatccacgctgatcaccggcgcgatgtgggttccgccgtcgggctcggcctgcgccagccagcgcaacccggccgcctcgccggccagattgtcggtgccccgattgtgcttggtgaaggtcgtggtcatgccacgaacatagggccttacggcgatcgtgtcggcaaccgcggtcggcagggccagccgtgagcgccccttccggggctcggattcccagtgcccgattcccagtgccccgatgcccggcgtcccgggtgcggggcgggaggaggcgcagtgaaccgcctttgttacaggcgggttactgcccaccgcattccatcgactgaggacggttggcggccacaccatcaggtgccagtatttgttgtcgtgccctagtgcggcacgtgcatgcccaggatcaccagttgcggaaagaagtcacggatgtcagatcccgtctatcacctgccccaggagcgaaagctcatcacctcgttgcccgggccgagttcacgcaagatcgaagcgaggcgcgacgccgtggtggccaagggcgtctcctcctctgccccgttctatgtggacaaggccgatggcggcgtcatcgtcgacgccgacggcaactccatcattgacctgggcgccggaatcgccgtcaccagcgtgggcgcctcggctcccagggtcgtggaaaatgtccagaaggccgtggcgaacttcacccactcgagcttcgccaccaccccctacgagggttacgtggcagtctgcgagcagcttgccgaactgacccccggttccttcgccaagaagaccgtcctggtcaattccggcgccgaggccgtggagaacgcggtgaaggtagcccgccactacaccggacgcgacgccgtggcagtggccgagaacgccttccacggccgcaccaacctcacgatggccatgacctccaaggccatgccctacaagaccggattcggccccttcgccccggagatctaccacttccccgcgagctatcccttccaggagcccacgccgctgaccggcgagcaggccgcccagcgtgccatcgactacctcgagacgcgggtgggcgccgaccacctcgcatgcctggtgcacgagcccatccagggcgagggcggcttcatcgtgcccgaacccggctaccttcctgccctgcaggcctggtgccgcgcccatggcatcgtcttcgtcatcgacgagatccagtcgggcttctgccgctccggaaagtggttcgccagcgagtacgagggcctggaaccggatgtgatcaccaccgccaaggcactcggcggcggccttccgattgcggcctgcaccggacgcgccgacatcatggactccgcacaggccggcggcctgggcggcacctacggcggcaacccgatttcatgtgccgccagcctcggtgccatcgccaccatgaaggaatgggaccttcccaaccgtgcgcaggccatcgagaccgagatccgggccaagctcggcgatctggtgaacgaccccgcctcctgtgtcggcgagctgcgcggccacggcgccatgatggcacttgagttcgtggcacccggcacccgcacccccgacgccgccaaggcgaagcaggtggtcagtgacctgctctctgagggcgtgctcatgctcacctgcggcatcaacggcaactgcgtgcgcttcctgccgtcactggtgatcccgatcccgttgctcgacgaggcactcgacctgctggtgaaggccatcaaggcctgacccggggccacccaggacctgcgagcacaccaggctgcgcacagcaattcagcggggccggcacctaggggtgccggccccgctgaattgcgtcagggatccgaccagtgggcgggcgctgcgttcagcgcagctgcgccagccgcgattcggccagctcagtcacgaatccgccagctcagtcacgattccagcgtgtggggtcgatgcgaccgccgtaggccggcagctccaccggctggtccccggagtggaagaaggcccacgggcgggtgaccccggccgtgccctcggcgcgagcgcgacgcacacgctgcgtggacacctcacacaccatgtccgccggggcgtcgtccccgatctcggcgagggtctcaccctcgggcccgaagaatgccgacaacccgcgacccaccggcgcagccgcattgacgctcaggaagttgacctggttgacgatggcattcgcccgggccatgaccatttcctggggtcgatcgggcgtggtggtcttgacgacattgatgatcgtctcggcccccagccacgcaagattgcggctcacctcgggaaaccatgaatcgaagcagatgcacagccccatgcgacccgccccgggaacgtcaaagaccgcaaagtcctgccccggcgtgaacggctcgagtgggcgccagggaaagatcttgcgatatgtggccgccacctccccgtcggggcgaatggccagtgcggtgttgaacagttcccccgacgggccgcgctcgcagaccgtgccgggcaccaaccagacgcccaggcccgcggcgagctgacgtagccaggtgaccctgggaccgtcgagcggctcggctgcctgctggtaggccttcgtgcgggcccggtcgggctgtccgtccgcgaacaggtgcatctcgggaaataccagcatgccgccatcgggggtcttggtgagcattgcggaacaggcctgctcgaacagctcccggggggcgtcgatcgcaagcggcgccgcctgggaggcgacaacggtgagactcacgcggcaagctcctccacttcggttgagtcggtcatctcgggcggcgggcggtggaagccatgggtgagccccacgagcacgcagattccgatgaacagccatgttccacccaccaacagcgccggcaggtccaattcggtgatcaggtagatcacgaccagggcgccgagggcggggaccacatagcccgtcagggggttgacatgctcgccgcgtgcgatctgacgacgcgtcagcgagatggccgacacattgaccatggtaaacgcgatgaatgcaccgaagttgatgaaggacgtggaggtgctgatgtcgaggaagcagccgatgatccccactgcggccaccacgagaatcgcgttgatcggcgtgttcgtgcgtggcgacaacctaccgaagaagcgcttgggcaagacgccgtcacgacccatcgcgaacatcagccgcgaggcggacgcctgggcggcgatccccgacgcgaactgaccgacgatcagccccaccaggaacacggtggacaggaaggcgcccccgatggccttcgcgatctcgaaggcggccgagtcgatgtcgagcacctgcaccagcggatgcaccagctcggtggcataggtggccaccacgaagatgccgccgcccaccagggcagtgagcatgatggcccgcgggatcgtgcgcttggcgttcaccgtctcctcggtgagcgttgtcaccgcgtcgaagccgaggaaggaataggcggccgtcgcagccccggccgacagcgccaacacgtcgaagggctttccggtgaagggcgtgaggctcagcaattgttgtccatggtgcgccactgcatagatggagaaggccacgaacagggcaatcaccagcacctcgatggcgagcagcaccaggttcgcgtggtcggcgaccttgatgcccacgatgttcagcccgctggtgatcacgatgaatccggcgatccacaccggatcggggatggccgggaactgggcgttcagatacgaggcaccgatcagccagatcaccatcgggatgaagacatagtcgagcatcgatccccagccgaccaggaagccgaggtggttgctgaccatcttgcgcacataggtgtaggcggagccggccatgggcacttcgtgcgacagccgaccatagctggtggcggtgagcagcatcgccaacatcgcgatcagatatgaccctgcggtgccgccgttcgacttctgcgagatcactccgaatgtgcccagcacgatgatcggagcaagataggccagcccgaacgccaggaccgagtggagcctcagctcacgtcggaatgtcaccggatgcccgggtccgccggcacgcgtcgcagcggtcggagtatctgtcatcgccatctcccactccttctgccggaggactgcctcgtcaggggttcggacgggggcacagaaacgaccggtgaggttgacattaggcgccggtgaccgcggacccgatggcgatcacggtgcccggatgtcacgtggctgaaacattggcggactagtcggatcatccggacccggcggcgtcatggcatgcagaagggcccgcactcgcacgatggcggggtacgggccctgcactgttggtcactgcccggggcagtgaccaacgaaaccttcgattacttgtcctgctcccccgactcgacgctcggctggctggccgatgtcgtgacctcgatcttgcggggcttggcatcctcggccaccggaatggtcagggtcaggacgccgtcggagtagtcggcgttgatcctgctgagatccagccccggccccaacgtcaactggcgcgcataggtgccatagctgcgctcgcggctgacccagtggctcttgtcgtccttgtgcacctgctcggccttgcgctcggcacgcacgctcagggtgcggtcgtcgacgtcgatgtcgatcgtggcgggatcaacccccggcaggtccatctttgcgacgaactggtcgccatcgcggtacaggtcaagcggcatgtatcgcgtatccgggccggccgtcttggccacctggttgaagaacctgtccatctcgcggaatgggttgtagatcgcagtgctcattgtcatcctctttgctctcgcagtgcgtcccgggggtctcccgggaccggttgctcctgatgcgtctcgcgtgcggacccttcggccccgcgcgttccgcttacatgttgggcaacctgaactcaacttcgattattccccttgagtccgaaagactcaaccctgatcccggttctcggggcggtagagtctcgcgacggccttgagcggggccataagatcgcttcgttcggctcaggaggcacccccatgcgcagtctcgggcgcattctcgcccacgtcgccaatctgtggccgtggtatctcggcatcgtcatctgttcactcgcctcggccggtacggccctggcagtgccgttcgtcctgcgctcggtgaccgacctggtcgtggcggcggtgaatacccacgcagtcgacctcggcgccgtcgtgcggctggctgcggtgctgttcgccttcgatctggccaacaccgtcacctcgaacatcggcggttacctgggcgacaacatggccatgcggctgcgtgccggactcagcaagcgctacttcgacaagctcctcggcctgccccagcgctatttcgacgacgaactgagcggcaccatcatcgggcggctgtcgcgctccatcaccgagatcacccagttcatgcagtcgttctccaacaacttcttcccgatgctgctcaccgtcggcgcggtgctggtgatcacggcccactattcggtgtggatctcgctgctgctcctggcgatcttcccgctgtacgtgttcttcactgcactcacctcccgacgctggcagcgcttcgagcggcgaaagaatgcccacgtcgaccaggcgagcgggcgcttcgccgaggtgatctcccagatgcgcgtggtgaagagcttcgtgcaggagaggcgcgaatactccggcttctcgcgccactatgaccgcaccgttgcgctgaccaggccccagtcgaggtggtggcacagcatggacgtggtgcgacgcggcgtgctcaacgtggtgttcttcgtgatctacctcatcatcttccttggcaccgcccggtcggtctactcgctgggcaccatggtcatgctggtgcagatggtgggcatggcgcgccaaccggccacgatgatgagcttcttcgtggaccaatcccaacgcgcggtcgcgggctcacgcgattacttcgaggtgctggcccaacccagcgaacacgactggaggcacgaggacgccccggcgcccgccctgatcgacgcggacgcacccacgatcagtttccgggacatcagcttcggctatggccagggtcctgacgtggtcgagcacatcagcttcgatgtggcccgcggtgagcggctggctctggtcagcgaatccggtggcggcaagaccaccctcgtcagcctgctgatgggcctgtaccgaccccggcagggtcagatcctggtcagcggacacgacacctccaccctgggcgtcacgcaattgcgcgccgaggtgggcgtggtcttccaggaaccgctgctgttcagcggcaccgtgagcgagaacatcgcctatgccgatccggacgtggcggaccagcagatccgtgatgccgcaaagcgcgcgaacgccgatgccttcatccgcgcccttccccatggctatgcctcggtggtgggtgagcgggggctcaagctgtccggcggtcagaagcagcgcatcgcggtggcacgggcaatgatcaaggatgcgccgatcctggtgctcgacgaggccaccagcgccttggacagccgtgccgagcaagcagtgcagaacggcctggagcagctgatggaggggcgcaccagcatcatcatcgcccaccggctgtcaacgatcgccaccgtggacaggatcgtcacgatgcgtggcggccgggtggacgagatcggcagtccggccgagctggctgccagtggcggcatctatgcgcagctgttggccctgcaggcctccgggcgccggcgtgatcgtcgtcgcctcaaggagttcgacatcacgcactgaccgcgccggtccggtggccggtccgcagtgtgggtcagcgccgcccgtggtggggacgcacgacccgcgtggcctgccagtcatcggccacgtcgaccgcgctggtgagggtgaggccggcgacctcggcaccctcggagagctctgagggctccacgtagccgggacgtccgatcttgggggtgaagagccagatataaccgttgttgcccatgtcacgcatcgcgtcgaccagggagtccgcaacgtcggtgtcgttgcgctgccacagcagcactacatcgacggcctccacggaatcctcgacgagatcgccatcaatggcatccatgatgtcggcccgcaggtcttcatcaacgtcgtcatcccatccgagctcttggacgatgaggcccggctcaagtttgagttgctctactccctcggtggacgagggagcccttctggtggttccacccatggctctacttcaccacataggctccgcggaactccacccggcgcggcgcggcgccgcgccgggtggaggccttcacgacggaatggccaccttttccggggtcaggactcacctccggcggtgtcctcctcggtggcatgcacgtccagcagctggtacttgttgaacgcctcagcagccttcgagggatcgatctcgccccgcctggccagcgtctgcagggtgcgcaccaccagtgaggccgcatcaatgtgcagatggcggcgcgccgccggccgggtatcggagaagccgaagccgtcggcacccagggtcacatagtcggtgggcacccactcgcggatctggtcctgtacggcgcgcatgtagtcgctggtcgccagtaccggcccgggacgccccgccagcttctgcgtgacgaatggcgtgcgcacgggcagctcgggatgcaggaacgcctgctcgtcgcattccaggccatcgcggcgcagctcaccccaactggtgacgctccagacatcggccacgacgccccagtcctccttgagcaggcgctgggcctccagggcccacggaacgccgacaccggaggcaaggagctgggcatggggcgcgttcgcgtcaccgtcaccctcgttgatcaggtgcatgcccttgacgatgccctcgatatcggcatcctcgggctctgcgggctgctgcatgggctcgttgtaggccgtgatgtagtacgagatgtcctcgggatcgtcgccatacatgcggcgcagtccatcgcgcacgatgtgggcgatctcatagccgtagcaggggtcatagctgaccagcgccgtgttggtgctcaccaggatgggcgagtggccatccatgtgctgggtgccctcgccggtcagcgtcgtgcgacccgcggtggcggccaggtagaagccacgggccagctggtcggcggccgcccacatgaagtcgccggtgcgctggtagccgaacatcgagtagaacatgtagatcggcaccatcggctggccatgggtcgcatagctcgtgcccgccgccgtgaacgcacccaccgagccggcctcgttgatgccggtgtgcatgatctgcccgttcttggcctcgcggtagctcagcatcaggtcatggtccaccggcgtgtactgctggccgttggggttgtagatcttgatcgtggggaagaaggaatccatgccgaaggtgcgtccctcgtcgggcaggatcggcacgacgaagggggcgaagtcccgctcgcgcatgaggtccttcagcaggcgcacgaaggccatcgtggaggccaccttctggtgacccgaccccttgcgcaccgacttgtaggccttgtcgccgggcaacggcaacttcttgccggtggtgcgccgctcgggtaggaagccgcccaacttgcgacggcgatccatcatgtattccatcgcgtcggagttgtcgggctccttgtagtacggcggcaggtagggatccgcctcgatctgggcatcactcaccgggatgtcacagcggtcgcgcaggcccttgaggtcgtcgatcgcgagcttcttcatctggtgggtcgcgttgcggccggcaaagtggcttcccaggaaatagcccttgatggtgtgcatcaggatcacggtgggggcaccgttgaactcggtggcggccttgtaggcgttgtagatcttcaggtagtcgtggccgccgcgacgcagcgaccagatctggtcgttgctccagtccgcgaccatcgcggcggtgcgcggatccttgccgaagaagtgctcacgcacccaggcgccgtcgttggccttcatcgtctggtagtcaccatccttggtgacgttcatgaggttcaccaacgcgccgtcggtgtcggcctccaggagcgggtcccagttggagccccagatgaccttgatcacattccatccggcgccccggaagaaggcctcgagctcctggatgatcttgccgttgccccgcacgggaccgtcgagccgctgcagattgcagttgatcacataggtgaggttgtcgagcccctcattggccgcgagctgcagggcgccgcgcgcctcgggctcgtccatctcgccgtcgccgaggaacgcccagacgtgctgctggctggtgtccttgatgccgcggttgcccaggtagcggttgaactgcgcctggtagatggcattgagcgggccgatgcccatcgataccgtcgggaactcccagaagtcgggcatgcgacgggggtgggggtagctgggcaggccgcgtccgcccatcggcttcgagtactcctggcggaatccgtccaggtcggcttcggacaggcgtccctccatgaaggcacgggcatacatgccggggctgccgtggccctggaagtagatctggtcgccgccgccgggatggtccttgccccgccagaagtggttcatgcccacttcgtagagctggacggagcttgcataggtggagatgtgtccgcccacgcccactcccggacgctgctgacggtgcaccaccatggccgagttccaccgcagcatgtggcgtacccgctgctcgaggtcctcgtcaccggggtaggccacctgctcagccggcgggatggtgttcacgtagtcagtcgacaccagcgacgggatgccgatctgccgggcgcgagcctgctcgttcagcttcagcatcacgtagcgggcacggttgcggccatccgcatcgatcatgccgtccaacgagtcctgccattcacgggtctcttcgggatccgtatcgggaagattcgttggcagtccattgagaatcggaccgggttgctcgcgaggaatcactgtcgtccttccatctgggctgacggcagcgacctttgctgcccgtcattcatcattcaacctgaccaccccgcaggccacaaccggattcctccaggtggggcgattcagccgagggcgcatggccctgtgagccgggccccgggcacgcacaggcatggttgggaatggtgcgcgacgatgatccgctgggcggccacggcggtccggttgtcaggacaccgataacatcgcagcgacgaaagggatggaccatgtcactgttcgccgcggtagaagcgacgccgaacgatccgatttttggactcaccgacaagttcaaccgggacaccgacccccacaaggtcaacctcggcgtgggcatgtaccaggacgacgacgggcgcgtcccgctgctggagagcgtcaggatcgcggaggaacgcctcgcccgggccgcgaagccggcgacctatcccccgatggacggactccccgactacaacgccgatgcacagcgcgtggtcttcggcgccgattccgaggccgtggcctcgggtcgggtggtcaccggacagtcgctcggcggcaccggcggactcacgctggccgctgacgtctacggcagcgtctcccccaaccacaaggcgttggtctccacgcccacgtgggcgaaccacatcgcgatcatgcgccatgccggatacgacgtgggcaagtacgcctattacgacggccggaccggcgtcgacatcgacggcctcctgtccgacctgtcgggggcggagcccggcacgatggtcatcatgcacgagtgctgtcacaaccccaccggatacgacctcacccgcagccagtgggacgcggtcaccgaggcggtccggcagcgcgggttgatgctgctcatcgacatggcctaccagggattcagccagggcctcgacgaggacgccgaaaccatccgccgccttgccgccgcgggactcaccttcatggtgtcgagctcgttctccaagaacttctcgctgtacggcgaacgcgtgggcgcggtgcacttcgtgtgcgccgatgccgatgaggccgcccgcgtgcgcaccagggtcaagactgccgcccgcgaggactactccactcccccgttgcacggggcacaggtggtgcgcacggtgctgcaggacgagcaactgcgcgacacctggaccgacgaggtgtcgaccatgcgtgagcgcatcaagaagatgcgcaccggcctggtcgacgggctgcgtgccgccggggtcaccgacatggacttcatcaacgaccaggccggcatgttcagctactccggcctggacaaggcccagatggaggagctgcgcgcggtgcaccatgtctatggcaccgatgcgggacgcatctgcgtggccgcgctcaattcacgcaacatcgatcacgtggtggcggcgattgccgctgtgcggggtcagtgaatacctcgtgcccgcccgctgaccggccctgcatgacaccggccggccggcgggccacacgcttgacgcgccccgggcgtgcgtcatgaccggcggactgccgccggtgctcagcgaccagcgtcgcgccaccatcaccgcgcacctggtcgcccacagcggggagttgaccacccgcgtcgtggaggcgatccagtcccgccacagttggttcacccgcctgggggccgaggaacgcagctggatcacggtggtggcccgggcaggtatcgacaacttcatcagttggttcgccgacgacgccaaggccgacgtgaaccccggttccttgttcaacgccgctccccgcgcgctgacccgcaaggtctcgttgcaccagaccgtggacctcgtgcgcaccaccgttgacgtggtgggcgagcagatcaacgagctcgtgccgccgcaggagcgtcgggccctcgagctggccatcgtctacttctcccgcgacgtggcgttcgccgcggcggagctctatgcccgggccgccgagctgcgtggcgggtgggatgagcgcatggaggcgctcatcatcgacgccgtggtgcgtggtgaggccgacgacatggtggtctcccgcgcctcggcactgggatggcacagccagggcgccgtcatggtggtcgtcggcccctccgcggcgggcgccgacctcgagtcctatcgacatgccgcagaagcgctgggcctggcggtcctcgcctcacggcagggcggacgcgtgatcctcatcggcagcggggagcagctcacggaccgcgacgccgccctggcgctggttgcccggttggagtcacgcttcggcgtcgggaacatcatcgtcgggccattggccccggacctggcgaatgccaacagggctgcccgcaccgcactggcagcggcccgcgtcgcctatgcatggccggactgcccccgcgtggcaagctctgcacagctgctgcccgagcgggccctggcgaaccaggacgatgcgcgcgaggcgctcctggaggagatctacaagccgctggccgacgcgggcggcgagctgctccatacggccgcgagcttcctggagcacggctcactcgaggcgaccgcacgcagcctgttcatccatcccaacaccgtgcgctatcgcctcaagcggatcgcccagaccacggggaactcactgaccaatccccggcaggcctatgtgttgaggctggcgatcaccctgggaaggcttgcggagggccaggaggagggcgcgaacgcccggatgcatcgctgaggcctggcgacacccgagccagccgttcgcacaaagaaacccctcccagctgaccgtccccacggatcatgttgtaggaaacctacaatccgtgatggtagattttcgtcgcgcccaatgccgggttcgaacgacaccgcagaggaagatggtcaagtgcttgcaatcgtcgcgcccggtcagggcgcccagacgccgggtttcctgaacccctggctcgagatcccggagttcgccgagggcctgtcctccctgtcggaggcaaccggcctcgacctggtggagctgggcaccacggccgacgccgaggccatcaaggacactgcggtggcccagcccctgctgatgggtgccggactgtacgccggactcgccctcaacacggagtcggagcacggcgccttcgcgctggccgacgtcgtggccggacacagcgtcggggagatcacggcggccgccggcgtcggagtgttggatcatgcccaggcagccgtgttcatccgtgagcgcggccggggcatggcggccgcatcagcagcacatgccaccggcatggcggcagtgatcgccggaaagcccgacgaggtgctggccgcgatccgggatgcgggactgacggcggcgaactacaacggacggggccagatcgtcgcctcgggatcgttggagaacattgccaggctgcgcgccaatcccccggctcgtgcccgggtgatcccgctcaaggtcgcaggagccttccacaccgactacatggcctctgcccagccgaagctcgcggagctcgcggacacgatggtcacccacgatccgatcacgaggctgctgtccaatgcggacggagccgtggtggattcggggcacgaatacctgcgccacctcgtgcagcaggtcaccattccggtgcgttgggacctctgcatggctaccatgcagaggatcggcgtgaccggcctgctcgaactcacaccagcgaagacgctcaccggtattgcgaaacgcaaccttcccggcgtcgcgttgttcaatctcaatacgcccgaccaactgtccgatgcgctcaccttctgccgagagcacgccggacgagtacttgagccccaggaggcctgagggatgaccactctgaaaacttctaccggcgcgcagtatgcccggattctgggcaccggttcgcaccgtggctcccgggtggtgaccaacgaagagatgtgcaccatgatcgattccaccccggaatggatcgagcagcgcaccggaatccgcgagcgccgctgggccaccaaggacgagacggtgctgtccatggccaccgacgccggccgcaaggcccttgacatggccggggtgaagcccgaacaggtgggcgccatcatcgtgtcgaccgtgtcgcaccacattccctcgccggggttgtcggactaccttgccgaagagctgggctgccctgctcccgcgaccttcgacatctccgccgcctgcgccggattctgctacgccctgacgctggccgaatccatcgtgcgcgccggccatgccggcaaggacggcttcgtgctgatcgtcggcgtcgagcgcctcagcgatatgacgaacatggacgaccgcggcaccgccttcctgttcggcgatggcgccggtgccgccgtggtgggaccctccgacacgcctgccatcgggccggccgtgtggggctccaagccggcgaacgtgaagaccatcgagatccagtcgtggaccgaggcggacaagaacccgaccggtttccccctgatccagatggatgggcacaccgtgttcaagtgggcgctgtcggaggttgccgaccatgccgccgaggcgatcgacgcagcgggcatcacccccgaacagctcgacatcttcctgccccaccaggcaaacgaccgcatcaccgatgcgatcatccgtcacctgcacctgcccgacagcgtgtcggtgtgccgcgacatcgccgagatgggcaacacctctggggcgtcgattccgattgccatggatgcgatgatccgcgaaggccgggccaagagcggccagaccgccctgatcatcggtttcggcgcgggtcttgtctacgccggccaggtagtcgttctaccctgactcaaagcccggatccgattccggactcctatcccaagtaactcaccagaaaggcgccaccatggccaccaatcaggaaattctcagcaagatcgccgaaatcgtcaacgacgttgccggtgttcccgtggaggacgtgaagcccgagaagagcttcgtcgatgaccttgacatcgactcgttgtcgatggtcgagatcgtctactccctgcaggaggcgttcagcgtcgatatccccgacgacgacgtcaagagcctgcgcaccgtgcaggacgccgtcgactacatcgaaaaggcacaaaagaaggcctgagcccccgctcgggaccaattcttcgatgccattccactggaggaaatctgcatgaccactgttgtcatcaccgggctgggtgccctcacacctctcggtaacgacgtggcgaccacttggcaaggactgcgcgaagggcgcagtggaatcggcgtcatcgacgaggattgggcctccgagctccccgttcacatcgccggttcgtccctggtggatgtcacctcgcacctgagccacgtcgagatccggcgcatggaccgatcgagtcagctggccgtcatcgccgcccagcaggcgtgggaggacgcgggattcaccttcgccccccagaacgagacggatcccgagcgcgtcggcgtggccgtgggcaccggtatcggcggcctggagaccaccgtgtcgcaatgggacctcgtgcgcgacgggaagcggcgcagggtgagcccctttgccgtgccggcactcatgccgaatgcctccgccgcgaactgcggactgcggatcggcgccaaggctgccgtgcatgccacggtctcggcctgtgcgtcgagcaatgaggcgatctcgctgggcatcgacatgatccggcttggacgcgccgacatcgtgctagccgggggtgacgaggccgtggtgcatccgctgaccatggtggccttctcgcagatgcaggcgctgtcgaagcgcaacgacgagccccagcgggcctcacggccctgggaccgcaaccgcgatggcttcgtgctctcggagggtgcggtgatgctcgtgctcgagtcgctcgaatcggcaacggcgcgcggggccaggatctacggaaccctggccggatcgggcatcagcgccgactcctacgacatggtgaagcccgagcccagcggtgctgggcagatggcggccatgcgcaaggccctggtggatgccgacctcacgccggccgatatctgccatatcaacgcgcacgcgacctccacccaggccggggacaccaccgaggcgcacgggattcgttccctgctcggtgacgacgccgaccatgtggtggtcaccagcaccaagtcgatgaccgggcacctgctcggcgccgccggggcgttggagacgatggccacggtgctggcactgcgtgaccgggtgtcgcccccgacgatcaacctcgatgatccggaggacgatctgcgcatcgacatcgccgccaacacggcccgtccgctgcccgccagcggccggctggccgcgctgaacaattcgttcggcttcggtgggcacaatgtggccgtcgccgtgaccaatgacaatgtgacccagtaacccggtggtgggcccctccacgtggtggggccgcattcatcaggaagcgccggggtggtgcgatcgactgatcgcaccaccccggcgcttctgttgccttgctgttcaccccgcctgctgttcacccggtctgcggttcaccccgtgcgccaaccgcacggccacccgcgacgggcggaccgctcagacggcgcgggtcaaccagcgcaccggtgcgtcctcgctggcgtggcggaagacgtcgagttcctcgtcccaggcggttcccagcaggtcgtcaagcgatgcccgcaggtcgtggccggggctgcggtctgccagcgcgtcccgcagccggttctccgcgacctggatgttcccggccgcatcggtaccggtgtggaagatgcccagggagggcgtgaacgcatagcgctcccccatatcggggttggcgtcctgggtcacttcgaagcgaagctcacgacacctcaacaacgccgagacgatctgggcacacgcgccctcgggcgcctgccagatcagctcggtgcgcatggttccgggctgcgcgggctggcgcgtccagtcgggactgatgcggtggcccagcaccgccccgatcgcccactcaatatgtgggcacaacgcacccaccgcggagtggatgaagatcacgccgcgtgtctggtttcccatgccggctcctctcgtcgctcaggtgtgccttccccagcagcctgcagacgatgcctgacatggtttttcggttcttcccagattgtgccccaccgggcagccagttgccagttcgctcccggcgcagatggcctcgctagggttgcgatcatgaccactgcgccgcaacaccagggaccgaccgttgccgactacggagcctggagctctcccctgactccggccgagaccgtggcggccggcgtcacgctgcgcgaattcggctccgacggcgacgacctgtactggctggagtccgcgtccgatgacgtggcccgcctcagcctgctgcgcagccgcgacgggcagatcgtcgagatcaccgccgctccgatgaatgtgcgcacccgggtctacgagtacgggggtggctcctggggagcacgtcagggcaccgtggcctggagtgacgacacgagtggccaggtgatggccaccagcctgggcggtctcacgatggccatcacgccggttgatccgaactaccgctacgccgccttcgtgccggtgcccgaacacgagtgcatcgtgtgtgtccgcgaggaccattcggcacccggcgagcccatcctgaccattgccgccctggcctggcccacggacgacgtggtgccccatgccggcacggtgctggtcgagggcgccgatttctatgcggaccccaccgtcaacgaggacggttccatcgcctggatcgaatggaaccaaccggcgatggcctgggatgccagcgccctgcgtgccggcaccctggtttccattcccgagctcgccgtcatgcatgtgcacacggtgttcgatgggcagcatgatcccggcagccccgtgtcgatccagcatcccaagtgggcctccgacgggcggctgctgttcatgagcgatgccgcgggctactggaacctccacatgtggacgcccacccgcggcatccgccagctggtggacgaggcggccgacggggaccttcccatgtggcagcagggtcgttccgccttcgccctgtcggggggctggatctattacgcatcgtgggatgccggcatctgttcgttgagccgggtgccggcccacggtggggccagcgaggccctcacgagcgtctcggacgtggatggactggcgagcgttgggggaaccgcatacgccctggtgacgcgacccaatgcacctgccgcggtggtcagcatcggtgcggagggcatgcgcattgagcacagtcccggggtgctcccggatccgaagatcacctccgtggcacattccctgaccttcgagggaaagcacggtcaggtgcagagctggttcttcgagccgcacaatgaggacttcgtggcgccggccgggcagctgcctccggtgatcctcaccgtgcacggcggccccaccggggtggccaccgacgaatatgacccgcaggtgcagttctggacctcacgcggcttcggcgtgctgtcggtgaactattcgggatcggccggcttcggtcgggcatatcgggagcgtctgcgcgggcagtggggaatcgccgatgtcgatgactgcatcgatgccgccgagagcctgctgagcgccgacctggccgatcagtccaagatcgcgatcatgggcggcagcgcgggtggcttcaccgtcctcgcggccctcacccgctcgtcggtcttctcagccggcatctgccgctacgggatcgccgacctggtggcgatgcaggagggcggcacccacaagttcgaggccacctacaacgacgggctgctgggaccgtggccacaggcccgcaaggtctatgaggaacgctcgcccattcaccacctggaccagctgcacgcgccgatgctcatcctgcagggcctggacgacgccgtcgtgcccccacagcaggccgacgagctcgccgctgccctgcgccagcgctcgctgcccgtatcggtggtcatgttcgccggggagggccatggcttcaggatgcccgcaaccaggacccgggtgctgaatgactccctgagcttcctgtcgcagctgttcggttttcgtccggccggcacggtggaggcgctcaccatcgagaacctgcccggcgcggcccactgaccagccgtccgcagaggttcccgggccacagcgcccgggcccggctgctcaggccggggtgccgtagtcgcgcggaccgaacagggccgtacccacccgcacggtggtggcgccatgctcaatggccaacggatagtcgccactcatccccatggacagctcggcccagtcggagccgagcaccccgtcgtcgcgcagtcgtgactgcagggcgaccaggcggtcgaagcatgccgcgacccgttcccggtcggggctgttcaccgccaccgtcatgagccccgccacggtgagggcatcgaagtcagcaagcgcccggcagaagtcctgggcatcgtcgacgtcgatcccgtgcttggcggcctcccccgaggtattcacctcgacgaggaccctcaggcccctgcccagggtgttcaggcgtcggtcaaggcgtcctgccagcttcagcgaatccagcgcctggaactcgtcgatgagcccggccaccgcgttgaccttgttcgactggaggtgcccgatgagggcaaagccgaaatcgtcgtcagggcgcaattcatcggtcttcgcgacgatctcctgcacatggttctcgccgaataaccgatgcgggacatgcccggcctggcgctccagcgcgccgttcacctgccggaccgcctcgatcggatgtgtcttgctcaccgggagcagccgcacccgggcggggtcacgccccgcccgttcgcaggcgtcggtcaccccggcgagtactccgcgaacgcgctcgtcgacaccaatgctgtgttcgttgtccatcatggccacctcgctgcctgtgatatcacgcccaccgcggccagcaccgcgaagatcagcgcaatccctgcgaaccggtcggtcacctcgtggtactcctcgacgtagccgatctggcgggaaatggtctggtagaccgcctggaggttcttcatactgtcagccgaatacttcttgccgcccgacagcttcgccacctgcgacagttcggcgtggttcaccgccaccgtctggcgttgcccgttctccacgacatagcccgtcgaggtgccgtaggcgatggtgtagatcggcacgttcttcttcttggcctccgtggcggcgtcggcggagtcgcgtcccatattggtggcgccgtccgacagcaggacgatcgcacccggcgccggatcgtcgggatggtcgggatcctggggcgcgagcttctccagcacgtccagggacgtgtagatgccctcaccgatggccgtcgagggggcgagctggatcgcatcgatggcggccttgagctgggtgcgatcggtggtcgggggcatcttgacattggcggtgccggcgaaggtcaccagcgccacgttgaaggccgagggcagcgaatccacgaagtccttggcccccgacttggcggcatcgagcctgttcggggtgacgtcggtggcctccatcgagcgcgacacgtcaatggtgaccacgatggtcgcccgctcccgggggacctgcgtcatcgcctgcggacgggcataggccaccaccagggaggcgagggacaacaccgaggccagcaccgacaggtggcgcttcagcgccgcgtcacgcggcagcaccctgcgcaggatcgagttggtactgccaccggaggtggcgcggcgacgggccgcgagcaccaggtacagcagggcgatcgccaccggaacggcgagccaccacagccggtcggggttcatgaagctcatcaagggtgtcatcacggccacctggttgccattgagacggcgcccagggccgccaccacgccgaatgccagggagtagagcgcccactgggcggtgacctccgtgtgggccgtctcatagccgacgtcggaggtcagggtcttgtacacatcgtccagctgcgaggcgctcgcggcgtccagggccttgcctgaactcgcgtcggcgatcctcttcaacatgtcggtgtcgggggccacgttgaagcgctggccatcaaggtcgacatagccgttctgggtgccgaacgcgatggtgtagatcggcacattctgctgcttggccttgtcggccgaggccaccgggtcgccgccaccggtctcgctgccgtcggacaggagcaccatcaggccgggggcctgcttgccgtcgtcaccggcgggcgcctgcttcagggcctccaggcccacgtcgatagacgatgcgatcgccgtgccgtcggccagctcaagggtcttgatgccctggttcaccggcgcccggtcggtggtgggcggcaccagggtgttcggatggccggacagggtgaccacggagacgttgtactgcgccggcagggcggccacgaacttcgtcgcggcatccttctcggcggccaggcgcgacgggctgacgtcagtggccatcatcgattgggagatgtcgagcacgagcacgatggtggcgcgttcgcggggcaccttgacgtcgcccaccggcaccgcccaggcccccgtgatcgcagccagcgagcacagcgccatggcgacggcgacatgtcggcgccactgacgccggttcggcacgacggcacccacgatgccggtattcgtgtagcggatgccgcgtcgcttgcgcagttgcagcacgacgatgtaggcgatgacgagcagcgggatcaccaccagggcccagagccgggccggctgctcgaactgccaccacaagaacttcgtcacattgtccatcagatgcccacccccttgggtggctgcgagatcacggccgcggtgcggcggtaggtgagcacgaaccgggcgatgtcggcaacccagtcgcggtcggtccgcaacacgacatggcccgctcccgcgcgtcggatcgccgcggccgtcctcgcccgttgggcggcggaggcggcattgatcgcctggcgggtacgggactggtcggtatcgacgaactgggagaagtcggtctccgggtcgcggatgagcagctcccccatgtcggggaagtcgatctccgccgcgtcgagcacctgcacgcacaccacctggttgcgtacggtgagccggcgcagcggacgctcccaggccggggggacagtggggtcgacctcggcgtcgccgggggtgaggaagtcggacaccacgatgcgcatgccccgccgctgttgggcgcggctgagcgcctcgatgccggcggcgagctcgacgcttccgccactgcggtccggctcgatgggatcggccagcatgcgacgcagcagcccgtagagcgcattgcgtcccgaccgtgcctgcagccgggtgacgccgtcgttgtgcatgatcatgccgccgaagcggtcgcccatcttctggctgatgaagccgaaggtggcgatggcggcgattccgaggtcgcgcttggtcatgccgccggtgccccagttcatggacggggtggcgtcgaggagggcccacacctcaagctcacgatcggcgatcgtgtcgcgcacatgcggcacggtggtgcgggcggtgaccgcccagtccatccgccgcacgtcatcctgaccgggtacgtagaccctggcatcgttcagatccgagcccgggcccgggaggaagcccaggtggtcgccctgcaggtagccgtccagtcgccgcacgatcgtgagttccaggcggcgcaacgccgcctcgggcgcgagtccacgcaggctcagcgtcggccccgacggctcgcggagcaccgacagcacggccgcggtgtcagcgtgtcccttcggctgcttcggggggcggaagtccggggccggggtcacgacgccgcgcgcccactgcccgcttgtgcggaggccggcggctgctggcccttgttccagaccggcgtcggtgcaggcaccatcgccaggacccgctcgacgacctgcgccggggtcacattgtcggcgatcgcgtcgaaggtgagcgcgacgcggtgggacatcacgtccagggcaacggcctgcacatcggtgggcaggacatagtcgcggccatggatcagggccagcgcgcgggccgaggccaccagcccgagggtggcacgtgacgagcagccgatctggatcactggtgcgaggtcaggcatgttgaactcgctgggattgcgggtggcgagcaccagccgcaccacatactcggcgatcaggttgtgcacgaagacattggcggcctgatcctgcaggctcctggtcaggtcggggtccagcacctgggttgccgtcggagccgtcaccgacatgcgtcgcaggatctcaagttcctcgctgcccttgggatagggcacgtccaccttgagcaggaagcggtcccgctgggcctccggcagcgggtagacgccctccgactcgatcgggttctcggtggcgatcacgatgaacggattgggcaccggataggtcttcccggcgatggacacctgcttctcggccatcagctcgagcattgccgactgcaccttggcgggggcacggttgatctcgtcggccagcacgaagttcgtgaacaccggcccgagctccacgtcgaagctctccttggacgctgaatagacccgggtgccgacgatgtcggagggcaccaggtcgggggtgaactggatgcgcgcgaaggttccaccgacgacggtggcgaaggtgcggaccgccagcgtcttcgccgtgccggggacgccctccagcaggatgtgtcccttggcgagcaggccgaccatcagctgctcgaccatgtgttcctgacccacgatgacgcgctgcacttggctgattgcctcgccgagcttgtgtgctgcgtcggcggttgacatcggttgcccgctgtcactactcactcgatactcctgaggggtcgtcggaacgccgggtggtaagccagcgtcggtggccaccataccgtgcggtggtgacgaatccgggcgtgcagatggccctcgaaacaattgtggacaacccacagcacgcgcacagtgcgatgccatccgggacaccgccacgacccccggcgggcaggcgctgacagcaattgcacagtggttcagcttcggtcgcccaccagattgtggtgagatggcggggatgtcggacgaagagagcacagccgggcccggagtcgcagccacaccctccgcagggcgcccgtcggtgaacgcctttcccctgttgcccactgatccgccccgcatcggtcgatggtggctggacgcgcgactggttgcgcgtcccagtggcgtggccttcctcgcccacgccgacggtcaggcgtccacgatgctgatcctgctgtcccggggcgcggccggcgacgcggcggcccgtgaccgactggccggcgagatcaatcggatgagcgaggagaccgtgatcgcccgcggtggccagggccaggaccagggtcggctggcccacctgttcgtgagccaggccgatgatccggtgggtcccgggcatgccgccacggcgccgtggacggtgcttgcctgggatgattcggacaatgccctgcgcgaggccgatcggctgttgcggtccgtggacctgtccggcagccccgagctcggcacgccctccggcccggcattctcgctgccatggatcgggcactccacgcccggcaactggcggctgtggccccccagctggcccgaccgcaaggaccgtacggggtgggtgcccatgttggccagctggttgctcatgatcctcgccgcgacattggcactgctcattgccgtcctcatcttccagaaccccccgcccggtggtggcggaggcggcggtgcgtccggttcgggcagcgcctcgggcacgggcagcgcctcaagcagtgagggttcgggcaccgagccctcaagtggctcgcccagtggttccggaagtggttcgggttccccgtcctcgtcgggcggacagggctcacccacgaagaccccgtcgatgaacgcgcccggacagggcagtgccaccaccacccagagcgccaccccgcagcaatcgcgactgtgaggtcaccatgacaggaactgttccccacgaggacatccggctgatcgccaccgacctggacggcacattcctgggcgccgggggtcgactggtcgctcgcaatgtcgaggcggtgcgtgccgccgctgcgcagggcatcaccatcgtggtggccaccggtcgcccgtaccggtggaccgatgtgatcgacccgctggccgacatccatcccctgctgctgtcgagcaacggcgccgtcatcgccgatcccgccacgggacgcgtcctgcaccactggccgattgacccggccgacggattggccttcggcgccgcgctcgtcaggcgcgtcccggacgcgggcttcgccgtggagttcgcgtcgcacggttggggggcggatgcccgctatgtggcggcccatccggagggcgaacccgacctggtggcgcccctggccgatctgatggccttcgatgacgtcgtcaagctgctggcgctgtcgcccagcacgcataccgaggccctggccgcggcggcggtggagccggccgccgggcgggtcgatcccaccttctccttcgtgcgcgatgaggggctggtggagtgcagcgcgcccggcgtcagcaaggcctccgcgttgaaggtggtcatggccgagcgtggcatcgactccggtcaggccatggccttcggggacatgcccaacgacctgcccatgctgcgtctggttggccatccctatgtgatggccaacggccaccggatcatgctcgaggccggcttcccgattgccggctactccgacgacggcgcagtgggggccgtcatcgaccgcatgctgcacatcgccgggccacggcgtccgtgacccggcgaccgcggcgggcctcagtgcaggacttcctcgggtagtgcctcgatgaggcgcagccacagctcgcttgccgtgggatacgacggcacggcatggcgcaacagcgggatgggtgtcgccgcgacgatggcaatggtcgcgccgtggatgagctcccccacctcgggccccacgaaggtcgcccccaccatgaccttgcgtgcccggtcgatcacgagatttgcgcgtccgaccaggtcatcacgcagcaacgaggcacctgccaccgtgttgtagtcgacggccgtcacggccacgtcgatcccgaccgcgcgcgcctgggcctcggtgagtccggtgtgggcaagctggggctcggtgaagatcacctggggcaccgggacggactccggcaccgcgtcgggggtcctccccgccgcacgcgccgcgatgcgttcgccgatgacgcgggcctgatacttgcccatgtgggtcagcagggccccaccactcgcgtcacccactgcgtagagccactcgggggtgcttccaccggtgatgtcctgtgcactcagaccgacggcgtccaaccccaggttgcccaattccggcctgcgccccgtggccaccagcaattcatcggcgaccagttcaggacccgacccatcagccaggtgaagggtgaccggcccgccgtggatgtggcccagccccgtgtcctgtggatcggccctggtgcatgagctgacgttcgcaccggtgatgacctcgatcccctgccggcgcaggccctcggcaatgagttcgcgggcgaagggctcttgcttcggcagcagggaacctcccctcacgagcatggtcacctgcgatcccagggcacgcatccaggtggccgcctcgcaggccacgacaccgccgccgatgatcgccaggtgcccggggacctccacgacgccggttgcgtcccgcgaaccccacgcccggatcccctggtagaccgcggggaccaccggttcactgccggtggcgatcaccacggcctggcgcgcccgcaggacgacgggttcggctccgtcgacctgcacgagccggtccccgatgaggcggccggcaccgcgcacgacatcgagccccaccccctgcgcccaggacacctgcccggcatcgcgatagtgggatacccagtgatcacggcgcttgagcagttgttcattggacaggcgttcgggctccagcccgtgcatgtggtcggcctgattggcgatctcgaggggcaccaggagggccttgctgggcatgcaggcgtaataggaacattcgccgcccaccaattcggcctccaccagtacggcggtgagccccgagtgctgcgtggcgtactgggccacgttctcgccggcagggccggctccgatcacgacgacgtcgtagtcacgcgtttccggttgtactgagttcgcgtccatttcgccatgttgtcacagctgacagtgtcacagccgacagcgccacaactgaccgagcggcgggacgctgcagagcggggaccgcacggccggcaccagcaccacagcggcaacgcgataccccggcatgcggtgtgatggacatctgcggtgtgccacgacccggggggaaggcgacggccccaccatagctatctgcgacatcctcgcggaggccatggtagggccgtgcacgcgcgggcccgccagccttgcggccggggccactgttccctcccaggggtgtcgagggaaccacgcagctcaataattgcatcattcgtggccaaataacagtgcagcgttaggttttttcctgtcgttttgccatgggggcattacgccctgctcgcgacctatcctgtggtcatgctcagctacgccgtgcacgaacatcaccgctgcgtcccggtggatgactacacccgcgacttcgtggatgtgccgcgctttgtggagttctgcagggcctgcccgcagcatgatcagacgtgggcctgtcccgagttcgactttgacccccgcgatgtctgggcgcgttacagctggatccacctgattgccttctcgatggacttcgaccccgaccagcgccgcacggggtgggagcgcgacgagctcacccgcgaggtgatggacaccttccatcgcgagaagaagcgcgccctgcgcaccatgatcaggctgcgcaatcgcgttcccggttcgcaggtgctcggcgcgggctcctgcgagctgtgtcgggtctgtacccgtcagcagggtcggccctgccgcttgccgcagttgttggtgcactcgatggaatcgatgggcgccgatgtggaggcgacctcccgcgaactgttcgaccatcccattgaatggagcgatggcacgagccttcccgacagctatgtgatcgtgatgggcctggtctgcaatcagcccgacctgccgcccgacgcatggggcaccccacgccatggcgtggcggcgcggccaagcgcccgggctgtgaaagcgcaatagtagagctgtgtccgtcaaccccagctggcaactactcgccgcactgatcctcatggtggcgatgtccgtggtcgcctcccggatcggccatttcaagatgggacggggcatggcctgggcggccgtgcgggcggcgatccagctgttcgtggtgtcggccatcatcgtggccgccattgcccacctgtggagctccgcactgttcgtcggggcaatgttcgccatcgccgtgtggacgacgaccggccgggtgggcacccgcaatgcgtgggcatggtcggcgctggccatggccagcggggtcattccgctgctcatcatcgtcttcgccaccggcaccgcgcccctcaacgggtattccctggtgcccatcgggagcatcttcgtcggcaacatgatgaccggccatacgctcaacggccggcgcgtcttcccggcgctgcgcgacaacatcgcgacctacgaggcggtcctgtcgatcgggctgccccgctcgaacgccatcgggatggtgctggagccgatcaccggtgaggccatcgtccccgccctggacagcacgcgcaccgtgggcctggtgaccctgccgggggcattcatcggagtgctgctgggtggtggttcggcccttcaggccggcgcggcccagctcctggtgctcgtcggcatcgtggccgggcaagccgtcacggtcatggtgatgaacgccttcatccgccgtgcattgctgctcccccgcgatctcagggccaggctgcgtccctgatcacgcaccggatcgttcagtccgcaccgtggccgacaccctgcggcaaccggccgcgctgccagcccaacagctgctccgcctgatcgaaggcgaagcggtcggtcatgccggccacataggtgaccaccccgagcatcgggtcgtccgggtcacgatggtccggcggcaaccgatcctggtgggagaagtagaacgacaccagttcctgcagcaccctgatcatggtgtgcgactgggccagcgattcgggacgggtgtagatgtgctcgtagttgaaccggcgcagcgccgccagggcgtccgcggtggacgtgtccatgccgatcgccccggtgcgacacgacgtggtcaccactgccccgatcagggcgtcgagctgctgggagagccgcacccccagggcctcgtgcacggtgccgggaacctgatcagcccggatgatgccggcatggatggcgtcctccaggtcgtgggcgcaataggcgatgcgatcggcccagctgacgatctcgccctcgatcgtggccggggcggggcgtgaccatgaatggttcgcgatgccgtcaagggtctcgtggcacaggttgaggtcggccagggcgacgtgcgccccccagggtccgtggtcgaaaccctccggcaggaagacgtcgaaggcctcctcggaggcatggcccccgggtccatgaccgcagtcatggcccagcgcgatcgcctcggcgagggtgacgttcgcccccaccccacgggcaatcgatgtggccacctgggccacctcgatcgcgtgggtgaggcgcgtgcgctggtggtcggtgggatagacgaccacctgggtcttgcccgccaaccgcctgaaggcggtggagtggatgatgcggtccttgtcgcgctcgaagcaggtgcgcaatgcgtcgggtgcctcggtgcggtcccggttccccgcgccgtgggcgagcgtcgccccctgacgcagggtggcggcctcccgctgctcacgggtgatccggtcgatgacctcgcccggccgtatcgatgcatggctgtcgcgatgtggacgcaccacctcgtcgccgcccagctcgtgctcatgcccggccatggtgagcgcccactgccgggcgcgtttcgtcacgtcgaggtcgtgcacattgtcagtcacgcctccagtatggccgccgccactgacatcaagcgggcgccgcggactgctcagccgcccgatacggccaactcggcgtccgacaggtccaggtcgaggccgccccggtcgtcgagccagccgtagggcatgaccaccttgtggcgtggcgtgccctgacgaccgcggggccgaccaagttcccgtgtggggtagggacagtctgcccccgccttgtcgagaaggcgggccagcaacgcgtcgagcgcctcgaagctgtcgatcagccccaggctgtgacgcagttccccgcccacggggaatcccttgaaataccagctcatgtgcttgcggaggtccgtgaggccgtgcttgacgcccatctggcgcaccagcagctccccgtgccgacgcacgatcgcggccacctcgccaagggtcggcagggtctggacctgctggccgtgcatggccgccgccaggtcgcggaacagccacggacgccccaggcagccgcgtccgatctcgactccggcgcatccggtgcgcgccatcatctcgagcgcatcggagggttcccagatgtcgccattgccgagcaccgggatgtccacggccgccacgagttcgccgatgcggtcccagtgggcatggcccgcgtaggcctctgccaccgtgcgcccgtgcaggcagatcgccgcggcgccctcctcctgggcgatgcgtcccacatcgaggaaggtggtgtggtcgtcatcaatgcccacccgcgtcttgacggtgaggggcacgccgtgggcgtcggcggcacgcacggactgccggatgatctcgcgaatgaggtccagcttccagggcagtacgccgccaccacccttccgggtgaccttcgggaccgggcagccgaagttgaggtccacatggtcggcccggtagtgggtgcacagctcatcgatggcccgggccagcacgcggggattggttccataggtctgcacgctgcggtgcggctcatcgtcgaagaaggtgagcatggagtcggtcttcacattgccgaccaccagcccacggctcgtgatcatctcgcacacgcacaatcccgcaccctgctcgtagcacagcgtgcggtaggcggcgttggtcacccccgccatgggtgccaggaccaccggggtgtcgatctggaccaccccgccggagggagacacgagtgtcagcggttgaatctgggccaccgcgccatagtaggcgctccgcacgcgcccccgggacggacaaggggctgtccggccgcgtggtgcgaccggacagccccttgtgggaactgcgtcctgatcagttgtcctgcgagtggcgcccgcggaacacggaacgccagcgctccttgttcacggtggcgatcgcggtcagcgggatgccggccgggcaggagatggcgcactcgccgtacagcgagcagggaccgaagtcctcatcgagctctgccaccatgcgacgcgccctcgagctgcgctgctccttgccctggggcatcttcgccagatgcgccagcttggcgccggcgaacagcatcgccgaaccattcgggcaggcggccacgcaggctccgcagccgatgcagctggcgaagtcgagcgcgagctcggccacctggtgcggctgggggctggtgtcggcgtccggagcggtgccggtcatcacgttgacggtgccgccggcctggatgagctcatccagggcggtgcggtcgatcgccaggtcgcggatcaccgggaacgcattggagcggaagggctccaacttgaagtgcgtcacctcggggaaggcgcgcaggtgctggcgacaagccggcgtattggccagcggaccgtggggcttcccattgaccaggaagccacagcacccacacacgccctcacgacaatcagactcgaagacgacgggctcgccgccctgttcgatgatctggtcgttgagtcgatcgagcaactcaaggatgctcatctcgggctcagcgtcgttgacgacgtagttttcgaactcacccttggcgcgaggacctgcctggcgccagatatccaatgtgaccttcatcggtaatccctcacctgcagatcgatcagcgagaattccaggggctcgctgtgacggacatgaaccccatcggggcgggtctcccaggccgagacggcgcaccaatcggcgtcgttgcgcttggcctctccctcggaagtggcgtactcggtacggaagtgggcaccggccgactcgcggcggtccagggcgtcgaggatcatgacctcggcgagctcgatgaagtcggccacgcggccggccttctcgagttcctggttgagccggtggtcgtcgccgacgaccttgacgtcgttccagtactccttgcgcagtgcccgcacctcggcgaggcccttggtcaggcccgcctcgtcacggctcacgccacagtaggcgtagaggatgtcgccaagcttgcgatggaaccactcgggacgatgcgtgcccttgctggtgaggaaggcattgatgcgatcctgcacccggcccagggcatccttgacggccggatcctgcacggccagcggcggcttgccgacatagtcggcgaggtagttcggcaccgacagcggcagggtgaaccagccatccacggaggcggacaacagggagttggcacccaggcggttcgcaccgtggtagttgttcgatgcctctccgccgacgaacagaccgggcaggttgctcatctggtcgtagtcgacccacaggccacccatcgagaagtgggcacccggtgcgatgcgcatgggcacctcataggggttctcaccggtggcgtcgaggtacatgtcgaacaggttgccgtagcgctcggcgatggtctccttgccgagacgcttgatggcgtcgcggaagtcgaggtacaccgagttgtgcagcggccccacgccgtgcccgctgtcaatctgcgtgcgggcgttgcggctggcgacgtcacggggcgtcaggttgccgaatgccgggtacttgcgctccaggtagtagtcgcgctcgttctcggggatgtcattggccgggcgatcgtcgccggccttcttcggcacccagatgcgtccgtcattgcgcagggactcactcatcagcgtggtcttcgactgccagtgtgaactgaccggaagcgccgtggggtggaactgcaggaagcacgggctcgcgaagtacgcgccctgcttgtgcgcacgccaggtggcggttgcattcgagttcttggccagcgtggaccagtggtagaccgagccgtagccgccggtgcacagcaccacgacatgggccgtccaggccttgatctcgccggtcagcagatcgcgggtgacgatgccctgggcacggccgtccttgacgatcaggtcaagcatctcggtgcggttgtgcatcttcacggtgccggcgtcgatctgctcctggagcgcctgggaacaggcgatctccatctgctggccggtctcgccgcgcgtgtaataggtacgcgagacctgcacgccaccgaaggaacgggtggcgagctgaccgccgtattcacgggcgaagggggcaccgatcgcgtacatgtggtcgatgacacgcaccgactccgtaccaaggcgcaccacgtcggcctcacggccccggtagtcgccgcccttgacggtgtccttgacgaagcgcttcagcgtgtcaccgtcgaccttgcgggcacgagcggcgttgatgccgccctgcgccgccacggagtgggcgcgacgcggcgaatcatggaaacagaagcagtcgacgtcatagccgagctggccgaagctggccgcgaagcccgcaccggacaggccggagcccacgacgatgaccttcatcttgcgacggttggccgggttgaccagtcggtagtcgtcctgacggtgctcccaggtgtggagcacatcgccggcggggacgtgcccgtcgatctcggcaccgacctcatagccggcggccttctgggccgggcccaggtggtcgcgggcggcctcaccggtcaggtgcgaggccggacggtgcgcactggcacgggcaggcttcggggctgacggggtcgatgcagccttgccggccgcaccggagaagagattcttgatgatattcacgagatcactccagcgaggatgagcatggggagtgcaccgttggccacgacgatggccagcgcaatgaggagcccgatgaggaaccagaccttgcgaagacgggggccggtgccaccgaagtcattgatcgtgttccaggcaccctggccgatatggcatccgatgatcaccatgatcacggagtagaagatcgccatccagggacgggacaggctggccacgaggttctcgtaggcatggatctggacctggtcgccaccgaggtggacggcaggctggtagtactgcgaggacagtccggcgccgatcgtgagatcgagcaggtggaccaccacgaagaccaggatcagcaggcccgacaggatcatcgtgcgagcgaagaaggacttgggcttggcgccgtaacgaccgaacttgccacgagccttacggccacgcagccagacggtaatgccggcccagacgtgcagcaccaggcaggctgacagcaccaggcggaagatccacagaccaccctcatagggcagcagcggatacagcagggtgcgcaggaagcgggcgtaggcgtcgtaatcttcagggcccataaaagccttgagatttccgaccatgtgcacaaagacgaacagggcgaagatcgttccagtcaccgccatggtgaccttcagagtcacattggacggacgttgcttcagcttgtgacgcgttacaacgtccccttgccctcctgatgtcgtcagaccgacactcatgaggaactccaatccgagggttaattggtcctaccatatgccccatggcgctccggggcccacttgggtggggggttcggaccggtttgcctcatacctggggcccttgttcgtcaccccacggtgcgcaatggagcagctgtgggccgaacccgggcagtggcccgcgggatatggacgggcgtccaccgcacgcccgggggcaaaggcgttttcccagaacccgcccggcgcgggattcgtggcgctatcgggtcgctttcccctcgcccgccgcttgccccggtaatggtgtttccgcgggccgcagggtggcaaagggatcggtgacttcgtaggcggcttcgacgaaccgataggtgcgggcagggcgtcccccacccgacccagagcggcgacggcgtccggtgggcgcgatctggccgcgacgcgtcagcacccgtcccagattggtgacgtcgacgtcgtggcccagcacccccacatagacatcgcgcagctccttgagggtgaactcatcgggcgccagggcaaaggcgatgttggtgtaggacatcttgctgcgcagcctcctgatgccggcctgcaccactgcggcatggtcgaaggccatcggcgggagcgcacgcgtgtcgagccattcggccgcaccccccggcaccggtccgctctgccccaacaacaccaggtaggcgctcgcgatcgtgcgctcaaagggatcgcgccccgggtcggagaaggtcgccagctgttcggaatagcggatgctcgtgaggtcgaggcgcgccgcaagatggcgctgcacggcctgatccatggtctcccccgcgttcacggggccgctcggcagcgcccattcgtccttgaagggggcccggtggcgtcgccacgccatcacctcgaggcgggtgcccgcctgcgcaagcgcgcggaagacgacggccagcacctcgtggcggaacctggcgaccggcggctgatccggcgcttgtgtcgtcatggggccatgctaacgttcggttcagttttcgactctcgaacgataaccaagttgaggaagtctcccatgaccgacaccgccatcagccaggacctgtgggccgacgagatccatgacctcgcgcgcagccgggacgccgtgatcctggcccacaactaccaatcaccgcagatccaggacgtggccgaccacgtgggtgattcgctcgccctgtcccgcatcgccgccgaggcaaccgcttcgaccatcgtcttcgccggggtccacttcatggccgagacggccaagctgctctcccccgacaagaccgtgctgatccccgacgccaacgccggctgctcgctggccgattccatcaccgccgaacagctgcgggcctggaaggcggagcatcccggtgccgtggtggtcagctatgtcaacacgaccgccgaggtcaaggcggagaccgacatctgttgcacctcgtccaatgcggtcgaggtcgtggcgtcgatccccgaggaccgcgagatcctgttttgccccgaccagttcctgggcgcgcacgtgcgacgccaaacgggccgcgagaacatccacgtctggcttggcgaatgccatgtgcatgccggcatctcccccgatgagctcatcgccagggtgcacgaccacgccgacgccgaactgttcgtgcatcccgagtgcggctgcaccaccacggcgctgtggttggccggccgcggtgacctgcccgccgggcggaccaaggtgctgtccaccggcggaatgctcgatgccgcacgcaccacccaggcccccgaggtgctggtcgccaccgaggtgcacatgctgcaccaactgcgccaggccaacccgcaggcgaccttcacgccggtgaacccccgcgcaacatgcccctatatggacatgatcaccccccagaagctgctcgactgcctgcgcgggggccacgacgaagtgacgattgacccggcgatcgccgagcgggcccgggccagcgtcgagcgaatgatctccatcgggaacgcgggacggggcgaatgacgatgggcacgtccacacagggcgccgaattggcgcacggcacaccggcctggcatgacgacgccacagtggtcgtcgtcgggtccggagcggcgggcctgatggcagcggtcgagctggccggcgccggcgtcgacacgatggtgctgtcccgcggccgggtcaccgactccagcaccgattgggcacagggcgggttggcggccgtgtggtccgaccaggactcccccgatctgcacgtgagtgacaccctgaccgccggggcgggcctgtgcgccgaggattcggtgcgcatcctggtcaacgaggcgcccgcggcgctgcgtcgcctgatcgagctgggtgccgtcttcgacaaggaccggaccgggggcattgacctgcacctcgaggggggacaccatgcccgccggatcctgcatgcgggcggggaccagtcgggccacgaggtggagcgcacgctcgtgcagtgcgtggccgatgccgtggacggcccgctgtcggtgcgcgaaggcgtgcgcgccgtcgacctcctggtggacgcgcagggccgctgcaacggcgtccgtgcgctcgacgcacagggcaggctcggggaggtgcgggccgcctcggtgatcctggcgaccggcgggatcggccagctgtggaccacctcgaccaatccaccggttgccaccggggacgggctcgccatggcatggcgtgccggtgcagtgctcagcgacctggaattcatgcaattccatcccacgatcctcgtggtgccggccgatcaccgcattcccggcgatcgcggcgtgctcatctcggaggccgtgcgtggggagggggcattcctgatcgaccaccggggcacgcgggtgatggcggggctgcatccactggccgacctcgccccgcgcgacgtcgtctcggcagccgaacatgcgcacatggcacgcaccggcgagcggaacctcttcctcgatgccaccgccttcggcgcgcaggcctgggagcacaagttcccctccatcctggcgatgtgtcgcgagcgcgcggtcgatccggtcaccgagcccatcccggtgcgaccgggcgcgcactaccactgtggtggggtgcgtgccgacatggacggtcgcaccagcatcgaggggctgttcgccatcggggaggtcgcctgcacgggcgtgcagggagccaaccgcctggcctccaactcgctcaccgaggggctgaccatgggacgtcgggtcgcccggctgatcgccaccggtaagggcgttcccaccgggcccgcatcggggggtgacgccgcgcgccggcaacttcccccacaggatccggcgctgttcgacgcggtgcgacgcacgatgactgccgcgggcagcgtattgcgcgacgcccgaggccttgacaatgcgcgccgggcccttgccgaccgcgccacaccggccgggaccctcaccaacgccacgctcgacgcgacaaacgccgcccaggtggccgaactgctgctggcggccgcggcactgcgtcgcgaatcacgcggcagtcatcgccgctccgacttcaccgaacgctccgcacaatggcagtgccaccaggactggagcctcgacgcacacggactacccgagatgaccatccggacgatcggccacgaacaggcccctgaaaggagtgcagcatgagtcccgatgtggccgttggccaacaaaggatcgacccgggggatgtccccggggcgctacgcgatgccggcctggagcccgaggatgtgggagccacgatcgaccgcgcgctggacgaggacctggcctatggccccgatgtgaccaccgaggcgatcttcgatcccgcagaccgagccaccgcctgggtggcgagccgtcaggatggttgcctggccgggttgccggtggccgccgcggcaatccatcgcctggccgcccggcagggcaccaccgcccgggtgaccctgttggcccacgatggccagcgggtgcatcccggcgatcgggtgttgctgatcgaggcgtccctgcgctgcctgctgaccagcgaacgcacgatgctggacctcctggggcaactctcgggcgtcgcaacccagactgcccgctgggccgacgcgctggcggggagccgggccgtgatccgtgacacgcggaagaccgtgccgggactgcgcacgctgcagaagtacgcagtgcgctgcggcggcgggcagaaccaccggatgggactgggcgatgccgcactgatcaaggacaaccacgtggccgcggcgggccggatcgcgcaggcgatccgggccgtgcagtcgcatgcgccacaggtggcctgtgaagtggagtgcgacacgctcgaccaggtgcgtgaggctgtcggggccggtgcccacctggtgctgctggacaatatggcccccgacgtgatgcgccgtgccgtcgcgatctgccggccggccggtgtcaggaccgaggccagcggcgggctcctcctggccgacgcgccggccgtggcgcccaccggcgtcgactatgtgtccgtgggagcgctcacccactccagccccgtgctggacctcggcctggacatggactgacacgcccggacgtcatcggaggcgcgccatcagagatacacgcgtcaagagatatggggagggcccgtcacagttgcctgtgacgggccctccccatattggtcaatcgtgcgtagtgcgtcgatcagcagccgagcaggcggctggacaggtactcgctgacaccgctcaacgggacgcgctcctgggccatcgaatcacgctcgcggatggtcaccgcgtcgtcatcgagggtgtcgaagtcaatcgtcacgcagtagggcgtgccgatctcgtcctgacggcggtagcgcttgccgatggcctgggcgtcgtcgaaatcgacgttccagtactggcgcagctcgtcggccagcccccgggccttcggcgacagcttctcgttgcgcgacagcggcagcacggccaccttcaccggggccaggcgcggatcgatcttgagcaccgtgcgcttgtcgacgccacccttggcgttgggggcctcgtcctcggtgtaggcgtcgaccatgaaggccatgaacgagcgggtgagccccgcggcaggctcgatcacatacgggatgtagtgcttgttctgggcctggtcgaagtagctcaggtcggtgccggagtgctcggtgtgggtcttcaggtcgaagtcggtgcggttggcgatgccctccagctcaccccagtccgaaccggcgaaaccgaacttgtactcgatgtcaacggtgcgcttcgagtagtgcgacagcttctccttcggatgctcgaacaggcgcaggttgtcctcctcgatgcccagacccacgtaccaggccttgcggtgatcgatccagtactggtgccattcctcatcagtgccgggttcgacgaagaactccatctccatctgctcgaactcgcgggtgcggaagatgaagttgccgggcgtgatctcgttgcggaagctcttgccggtctggccgacgccgaacgggggcttcatgcgcgttgaggtgagcacattcttgaagttgatgaagatgccctgggcggtctcgggacgcagatagtgcaggccggcctcatcgtggatgggtccgagataggtctcgagcatcatgttgaagtcacggggctcggtgaacttgccgcgcaccccgcaattgggacacgggatgtcctccagcttcacggtgtccgcgtcggcaatccccttgcggaaggcgtactcctcctgcaactggtcggcacggaagcgcttgtggcagttctggcactcgaccaggggatcgttgaacacggcaacgtgtccggatgccacccagacctcacggggcaggatgaccgaggagtccagcccgacgatgtcgccgcggctggtgaccatatagcgccaccactgcttcttgatgttctccttgagctccacgcccagagggccatagtcccatgccgccttggtgccgccgtagatctccccacaggggaagacgaagccgcgccgcttgcacaggttgatgaccttgtcgagtttgctctctgccactgttgctcctctggttgcccggggcgggccccggtcacgtcccgatacctggctggcatcggatggacggccgccgggattccgcggccgcttccccaatcatgcccgagtgcgccataatcggctcccgctctcaggggcgcggacgggccatcgtccggcccccgccggaccggactcctagttgagaacgatttgcacatgggaacgactcttatctagaatcattctcatgaacttcacgccgcgtacacggctctcgagatgggccgtcgggcttgttctcggagcactcatcgtcccacttgccgcctgttcaacgccttcgtcatccagtagcgcgtcggccggcaagctcaatgtcgtcactgccttctatcccttcgaattcgtcagccagcgggttgccggggaccatgccaatgtcagctcgctgacggccccgggcgccgagccccatgacctggagctcaccccgaagcagaccgcgtccatcggggcggccgacctggtggtctaccagacgggattccagtcggcagttgaccaggcgatcaagcagagcacgccgaagcatgccgtggacgtggccagcatcgtgagcctgcaggcgccccagggcaccgtcgacctcggcgatggcgacgatgaccagtacaccaaggatccgcacgaatggctcgaccccaccaacgtcgagaccatcaccaacgcggtgcgtgaccagctcagcaccattgacccgtcccacaaaggcgattacgaggcgaacgccgccaagctggtggccgacctccagggcgtggacaacagctacaagacctcgttgagcacctgcacccagaagaccttcatcaccacccatgccgccttcggctacatggcgcgacgctacggcctcaaccagatcggtatctccgggctctcgcccgacgaggagccctcgccgacccgcatcgccaaggtgcaggacctggccaagcagaacaatgtgaccacgatcttctacgagacgctgatctcaccgaaggtggccgagtcgattgccggtgacctgcacctgaagaccgatgtgctcgatccgctggagggcatcaccgacaagtcccgtggcagcgattacctgcaggtgatggactcgaacctgacggccctgaagaccgccaacggctgttcgtgaccccatcatccccatgagctggtgagctcgcctgcactcctcccgcaggcgggctcactgcgctgtccactacccgaatcgagaacgcacacatatgcccgacaaccaacccgtgatctcgtgtgaggacctgtcggtgaccctcgagggccaccagatcctcttcgatatcgacgccgaagttcatcgcaacgaaaccgtcgccctgctcggggccaacggctccggcaagaccaccctggtacgcgccctgctggggctcattcccatttccgggggcaccgccgaactgttcggcactcccctgtcgcaattcaaggactggaaccgacttggctatgtgccccagcgggggcattcccaggtggccaatgccacggtgcgcgaggtggtcgccaccgggcggctggccaatcgccacttcttctcgcgcatgcacaagcaggaccgcgatgcggtcgacacggccctgcgacgcgtcgagttgagccatcgtgccggtgatcccctgtcggtgctgtccggcggacaacagcagcgcgcactcatcgcccgggcgctggccagcgaggccgagctgctcatcctggacgagccgctggccgcgctcgacatccccacccaggaatccctggcccggctgttcgaacgcctgaagtctgacggactgtcgatgttggtgatcctccatgagctgggcccgatggagcggctcatcgatcgcagcatcatgatccaactgggccacaagatctacgacgggccgctgatggcgggtcccgccattgattcgggccaccaccatcccgcgccgatcggcgccgaccaggccgtcatcagcggccccgagatgcgtcgtccgcacctgaccaaggaggcctgaggtgagcgtcttcgcacttgccttcatgcagcgggcgttgatcgccgcgttgctgtccggattcatgtcgcccgcagtgggcacctacatcgtgcagcgcaagttgagcctgctgggcgacgggctgggtcacgtggccatcgccggcgtcggcctggcgctgttgaccggctgggcaccgacaccggtggccatcgtgatctgcgtggtgggcgcggtgtccatcgagttgctgcgccagagcggacgggcccccgcggatgtggggctggccatcctgttctatggcggactggccaccggcgtcctgcttgcgggaatctccggtcagggcaccggggtgttgtcgcagtacctgttcgggtcgctgaccacggtgagcatgtccgatgtggcgctggtggccgtgatggccgccatcgtgatcatcctctcgttggggctgtcaccgcagctgttcgcggtgtgcgccgacgaggagttcgcacgcagccagggcctgccggttcgggccctggagatctgcatcgtggtgatggcctcggtgacggtggccgtgtcgatgcgcaccgtgggcctgctgctcgtcagcgcgctgatggtcgtaccggtggccgccgccaacaacctggtgaccggcttctaccgctcgatgttcaccgcgatcggcatcggtgtggtggtgagcttcatcggcgtcaccggctcctactactggaacaccgcctcgggcgccaccatcgtggtcagtgccatcgcggtcttcgccctgagctggccggtgggatcgctgctgaacaggcgccgcctggcccgttcccagcgcatccccgatcccgagacggcccgcgacaacgccgccgaagtcgccgcacaccgtccggtcgacccgtccgaactggtgggcgacgacggcaaccacccccgaatccagcatggcgaccatgtggactatctgcacgggaaccatcgccatgccccacatggagatcatttcgatgaacactgaacgggacccgggtcccgagcaggaaaccacccccgccgccccacgttccaccacgggacgcgaggaggccccccgcccccgaccccgccagaccaagcagcgtcagctgatcagccggatgctggagaaccaatcccgcttccgcaccgcgcaacagctccatgccgatctgcgcgccgctggagacagcgccagcctggccacggtctatcgggtgctccaatcgttggcggagcacggcgaggtcgacacctggcgcactcccggcggcgagctggccttccggcactgctcgccgacccaccaccaccacctcatctgctaccgctgtgggcgcaccgtcgagatcgacgccggacccgcggagcagtgggcgtcccgggttgccgccgagaacggcttcatccacgccgagcaccaggtggaggtctacgggctgtgcccccagtgcgccgccgagatcggcgagggccactgatctctgcccccgcgccttcgcggtacccgggtgccccatggcccgggtatcccggtagtgttgggggcacaaacttccatcgccgaagggaagccggtgagatgccggcgctgacgcgcaaccgtgagccgggccatctggcctgatgagccgggatacttcgcgagatggtctggccacaacccgctgccgcggtcgcagtggaggcggacatccgtcgtccctgctcgcagcgagagaggacgacgtgccatgtccacgtcacacgaagcatccccgggatcgctcatccccctggcgcccggcccatcggtgccgcgcaccttcgcacccgccccgcagctcctgccgcgctccgtgcgggtggcggggtcccccatcaccatcctgaccgaccgggccgggacaccgaccccgctggagcgcaccccacggccctttactcgggcagaactcgaggtcgcctgggtgcagtggtccgcgctggatccacgactcgccgacacggtgatggtgctggcccacactgcactgaggtgggacgaggcccgggcactgaccgttgacgacctggtgccccatgcccatcagatcatcgtgcgcgcgcactgcccgggccgggtccgacgcccgctggaaccggcgctgcaccggcgggtgccggtgtcgttgcgcatccgccaggcactgcgcaggctcgcttccacgccggggccccaggggctggtgttcaccgacccggacggtgccccgctgtgtcgcgccacggtgcggcgggtcctcgactggtaccacacggccccgggccatggcctggccgatcttccggccactgcggcccagttgtgggccgacgacggcgcgccccgcgcggtcgtggccgagtggagcggccgtccggcagggtcgtcgcgatcatggggctgagccctcggactcctccactgctgggacccgtcgcccggcttccccggcgcgtggcttccccgtcgccggattcccttgcagcgggcccttgcagccgggccccggccccgctgggccggcatcaccgtgcggcgcattcgacgtgcacacgccagcgagccccggcgagtgggaccggccggggctcacgtccgtcccgacgaggcacgggacggctggtgcggcgtgatcaacgaatgttgagcccgctcttcaacacgcaacgacgcttgcgggcgaagcagcgggccgaggtcaggccctcaccggtcgggccggcgatggtgaaggtgggaaagccctcaccatcgatgccgatgccgttgtacgaggggccgttcttcacgaagatcgtggtctggatgagcttgcccatcttggtcagcgcgttgacattcgacgagtgcatcacggccgtgtgacggttgccgtgctccacctccaccgccttgtcgatggcggtgtcgacatcgggcattcgcacgatcggcaggatcggcatcatcagctccacctgcacgaacggatggtcgaagggcacctcgcagatcagcaggcgcgtgtccttgggtgcgctcaggcccacctcggaggcgagctgggcggccggcttgcccacataggcggcgttggcatgctggcccttggtcactagggcggccagcttgtccatcacggcgcgatccttcaactcgaagcagccgtgcttgagcatctcgaacttgagcaggtcggcaatggaatcaaccgccagcacctccttctcggcggtgcacgggaggttgttgtcgaagctggccccgtccacgatgtcccgggccgccttggcgatgtcggcggtgtcatccaccacggccggcgggttgccggcgccggcaccgatggccttcttgccgctggacagcacggccttgacgatgcccggcccgccggttgccacgagcatgcgcaccttctcgtgcgacatcatggcgttggtgttgtcgatggagggctcctcgaccgtcaccaccaggttggcgggcgcacccgcagcggcgagcgcgcggttgatcttgcgcaccagccacagggtgatcttcttggcacgcggatgggggctgaagaccaccgcgttgccggccgcgagcatgccgatcgtgttgttgatcaccgtctcggtgggattcgtcgtcggcgtgatcgccccgatcacgccgaagggcgagaactcgacggtggtcagcccgtcgtcccccgaccaggcctcggtgatgatgtcctcggtgcccggtgtgtacagggcggcgtagcgattcttgaggatcttgtggggcacattgcccatccccgtctcctcgacggtggcggtggccatgtactccaggttgccgggctcgctggccacgtcgcggattgcctggatgaaccggttgcggtcacgcaacgagcagtccatgtactggcgccacgcctcgtcggcggcgtccaccgcactgttcatgtcggtgaagatgccgtcggtgccgctgggggcatccgtaccggaatcctggcgtgagatgacctcacgcaccgtctcacgaacgacccgctggattagttctgggctgatggtcatgaccgactcgcttccttggctcgcgacatagcaaaactggcaatggtgacgtcctggtcgaccgtgccgccggagacaccaatgcccccgcacagcacaccctcgacaaagaccggcaggcctcccccgaagacgaccacgcgtccgtcgttggagttctggattccgtggagctcagcgcccggcagggacgcctcgcccagatcggcggtcggctgtttgaaggccgctgccgtgaatgccttgttcgacgccaggtcaaggctgccgagcagggaatcctccatccggtgcaggagcatcagatggccgccggcatcgacaccggcaaaaacaatgggtacgcccagctcggcaccccgggactgggctgccgccgccatcgcctggagcacgtccaggtcgtagcgggcgagcccgaaccgggtggcggggtcggccgtggtcgagacatcggccggcacgaagccgctggcggggctccacgcgacacggggctggggcgactgcgccgccaggtgcttctcgacgacggacctcaccaggccctcgagccgtgccacgtcgaagcggtgctcggccacgcgtgccaacgagtacagggcatccgacagccgattcacatagcggatcagctcggggcgcaccggacgcgactcggcggcggtcaacatgcgtcgctcggcacgtcgggtgacggtgcgcgcgcggtggagcgctgcggagaccaggtcgcgaccgggaaccacgaagttgcgctgtggtccggtctcggccatcgaatcatcgatgagtcgttccaggtctgcgacgtcgtcggggctgatcgtattggcgatcacggcgcgtccggcctcgtcgctggccaactcggcggcggcgacgaacaggcgctgttggatgtgctggagggcggcgcgcatgtcggggtcctcgacgcgcgccttcgcctcgccgatggtggcgttggcctcgtccagggttccgtaggcctcaacggtcgggtcctgcttgggcaccctggtgccgccgaacaagccggtggttcccttgtccccggtgcgggtatagatcgctgccatcgtcacgccggtccgatctcgacggtgtcgacgattccgacgatggtcgaatcgatcggtgcgtccttgcgatcggcggcgaatcgcgccgagctgcccttcgtgacgatcacgatcgagcccgtgccagctcccacggtgtccaccgcgatctccggacgtccgaccggctcctgcgggagcccgatctgctcgatgagcatcagcttgaagccgaccagccgttcgtccttgctggtggagaccaccgtgccgcgtacctttgccaagaacatgtcacaccaccaccgtgatctggatatttcgggaggccgccatgtcccgggcggcggccgtcaccttcgtgtcgggccggatggccaggcatgaagccgggtccaacttctgcaccacgccctggctgatcagcttcagggtgctgggcgcgcccgtgaccggtccgcgcggcgccggctcacgccgggtatcggtcacgcgcgtcccccggtgggagacgccgccaccgtgcggccggggagccggtgccgggatcgcgggggcggcgcatgcggcaagggcctgtgccgggattccctgggcgatcagcgcgtccttgtgtgccgcgtcgcgacggtcgaaggccgccagcgccgtgcgtgcgagcgcctggcttcgggccagcctcaccccgaaggaggtcagggcggtcaggttggcgcgcaacagctccgcgtaaccggagggcatctcgggatagatcgaacgcttgggcgcctcgtcggggctgaccgcggtgcttgaggcgacgaccaggcggttgctcatgatgaactcactgaacaggttgctggccaggcagtccgcgatcccgtgggacaccttggcggcgacgttggccgtcagggtcggcgcgatgagcatctggtggttggccaccaggtggtcgtcgacctgtgggaggcccagggccccgatcttgtgctggtcgaggatccggcgggcgctgggggtttgcaccacgtcgagggcgacgccctcatcggccagtgcgcgcaggcccccgaggcattcgtcaaagccgagcaggccgccggtgaagaccaccagcgcgcgacggggggcgggggcgagcagttccacgagcgtctgccggatgatcgccctgagttgatccggattcatcgggattcctcctgggcgggcatcgggatgccgagcggggtgatgaacaggggttgggccggacgcaccacgggtcggtgcagcctggcctcgaagatggccggtgcgctctcgaacgaactcgagccacccaccaggtagacggccggcacgtcccgcgagccgagggcctgcgcggcgatggtcgccatcttgtcgagggtggggcggatggttcccagcacctgttcgcggtactgcggatcctacttcatggcctcggcctggtcgtagtcgatgttgttcgaaccggccagcaccagggtcatgtgatggccaccggtggcctcgtcaaccgacaacaccaccttgccgtcctccaggatcgacaccccggtggtgccggcaccgacgtcgatgaccgcgccgtcggtgatgcccatggcgcgtgcggcagccaccggctcgtcgaccacctcatcaaggtcgaggccggccgcgccgatgacattggcgaacacctggatgtcaccgtcgctgatgccggggggaatcgagatcgaggccttggtgaactcgtggcccaggcgttgctcgacgtcggcgcgcagcgcgcgcacggcgctggtcgcgcctgcccaatcgaccaccaccccgtcgcgcacgacggtggagtgcacccagccccccgcaatcgggtggttggccgcgtcgaccactgccacgacgatgttcgccgtgccgagatcgaatcccaaccgcatctggccggtcggttcgtcgatcgcgccggtgcggacctgctcagcgaaacgcatgatcgcctgctcggggagctccacgtgcgtcgtcaccaccattccagtcatcgccattcgcctgtcctcgcgttgcccatcgtcgtgccgttggccatcgtggtgcagggtccgtgggcttccggcccccacacggcgggcagcccgaaggcgacccggcagctgggcgtcggccggaagccacgtggaccctgcactcatcgtcatgcctgcttgggcaggagcttctcgacgtcggccgcgggacgcgggatgacgtggcggctgagcacctcttcgccgactgccgcggcggcggcagctccggcatcgacggcggccttgaccgcgcccacgtcgccgcgaaccatcacggtgaccaggccggcgccgaccttctggtagccgacgagcaccacattcgcggccttgaccatcgcatcggccgcctcgacggacccgacgtatcccttggtctcaatcagacccagtgcttccctcatggtgtttccttcccttgccatttcgcttgcctgcgtatcggacatcacttcttgccggcttcacgtccggcttgcggtgccttcctgcggttgcgggacggtcccgctgtgcccttgtcaggacgctcctgcgagggcgagatcttgggctgcgacggcacggccggtgccgtggcggccgggtcatcggccacaggccccgctggtgccggatcgggggccggtgccggatcagtggtcggtgccgcgggctctgcgtcgcgcggcgggtccgccggatccagggcccgctcggcggccgccatctgctcgggggtcgcggcctccggcgaggtgcccccaccgggccgggcagccggtgaggcgcccaggccgaccgtcaccggggtgagcaccaccggatcgatctggtcattgggtcgcgggatcaccgactcggcgaacacggaggtgatctggctcgcagccgccctggcggccgctatggccgactgcacggccgagacctggccggtgatcttcaccgtcaccatgcccatgccgtcggtcgtctcgtagccgaccaggcgcacatcggccgccttgcaggcgacgtccgccgcggtgatcgcggcaggcagtcccagcacctcaatggtgcccagagcttgggtgagctgcatctcgtctcctcgtgtcctagttcatcggtagtagcggtatgcgcttgaccagtcgggccgcgttggctccgatggcccggttgcgcgcggcgtcccggctcaggttgacggcgatgtagggacgctcggcgggcagcttctccgtggtgatcacggcatagctgagggcgaccccgatgcccacgccgagacgggattccacgctcgcctcgtgcgccagctcaaggggattgatgcttgcctgccaggtgacagtgctcggcaccccctcctcctccatgccgaagcagatatcggcgatctgatcagccgtgatctgatcgctgacgcgcatgttgatcgtcggcttgtcggtgttcatcggcctgcctcccaggcgagcacgagtccggtggccaccgcattgcgcggcccctcggtgccccgggtgttggcgcgcccggcgaccacgcggaactcggccaacgcatgggtcacgaattgtgggatctcgaaatcgagcgccgagccacccacgagcacgacatgggcgatgtcgcggacattgttggtggggctcaccgcggcgagggcccgcatggcattggtcacgaagacccgctgcttggcgtggatacgcacctggcggatcacctcgaggggatggcgcaggggcagggggatcatcccgtcgggatggagcaccacggtgcgcgcgaacagctcgggggccagcggctcgtcgaagaactgcacggtgccgtcctcgtggcggatgctgaacagcgtctcgacgcgggcgagcggatagcgcttgatgttctccgcgtcctcctcgctgtcgagtcccagctccatcttgatgagcagcgtgaccatgttcccggccccggccaggtgcactgacctggccggctggccctcgcgcaggacggaggcgtcggttgatccggcgcccatgtcgaggatggcgatcggcacggaggtgcccggtgtggtgagtgccccacggatggccatgtcggcctccacgccgccgacctccacccgtacggcgaattgttcggtcatctcctcggcgatgcgctgcatctggaggcggtctgccttgaccatcacggcgatgccgacggctgcctccagcgagaactcaccggccaccccgccggtgaccttctgggggacgttggtgtccacggccaacaggtcggtgacctcgatgccggccgggtcgcggtcggtgagccggcccatggtgacccgcaccttctccatcatcccgccgatgttggtgccgggctcgcccttgatgtcgcggatggtgcccacggactcggccgcgtgcatgatctcctgcgccccgcgatcgacgtccacctcggcggtgcgatcgcccaggaagcgcaggctgccggcaggaatgtggcgttcggtgacatctccggcgggggtcttgatcacgacggcggagcggttgcccaccaatgacctggccatggggacgacgctggccgtctcgtcggggctcaggccgaacatggtggcgatgccgtagggattggagagcgtctcgacgatccggccgacttcggccacctcgatcgccgccggcatgccgatcggtaccttgtcgatcagtttgacctcatcgacgatcgggatcttggcggtcagccggttgtcgaccagcacgccgtcgtccaattgcaggatggcaccggtgatgttcacccgggcggccgcctcattgatccgggcggccacgtcgaggaagccatgggtgtggtcggccacgacgatgtagggctcaccggcgctggcctgcccgaggtcgtcgagacggatggtcgtgccgaccccgacgcccagtcccccgggggtcgaggggttgtggccgatcatggtcgactcagtgatgatcgtctcggagatggtctccatggccacatcgccgatcaccggcgccgcctcgttgatccggatgaggtcgagttgctccagttcacggccggcggtctggagtgcctgggtgatcgcctggaacaccccctgggtgttctgttgggtgcccttgatgccggtggtcgacacgatggccgacgcaaggaaccgcggcggggcacccgcggcgacgtccgcgagtgccacctccgtggtcgcattgccgatatcgacaccggcgatgagcgtcatgtttacccagacctccagatttccgacgtcagtgcctacgcgtccgccttgaggcggccccgcttctcgtagacatcggcagcctcacgaatgaaggcggcattgatggtgcagccgtacttcgtctcgaggccgtcggcgatcgcatacagctcggccttcgtcgaacggtaggggcgcagggcgttgtagacgtccagcacctcctcgtcgggcacctggatgagctctgcggcgcgacgcaggttgcgggccagcgcgtcacggtcggccgattcggccacctgtgcctgcatctcaagggtctccggggcaatccggaagtccttggcggtcaactcgccgctcttcaccttgtcgaaggtgaagtccgacagggcccgacccgatgccgacttgatctgctcgggaaccttctcgcccagcggatacgaggacttgtccacccgatgtgcggcaccagtggtgctgggggcagcagcgggcaacttgtctaatgcgacattgtcctggttgaggtttgccatgacctcgcccatgatctgacgaatcagttcttcggaatccattgcctctcctaccggtactcgacccgaagtgcctgggtcttcttgttcagatcgcacatctgggtttccttgatgtgcaacagggcggcgattgcctggtacttcggacgtgccatctggtcattgaccaccggcacggggtcgggcgactcacccttcgcgtagcgggcggcattcttgccgatcgcccggaaggtggccagatcgatcaacggggactggctgaacagctccaggttcgacagcggcggcaggtccttctggtggatcaccgtggtgccgcgcgactggatgccaatgcccacgcccgagcccgacagcaccgcggcgtcgtgggcgatgaagcccacatcggcggtacggaacacccggatgaaccggtaggtcaggccctcctcctcgatgccggcgcagatttcgcgcagcacctcggcgtgcgggataccgatgatcgtcttggtgatgcgtccgccgaaggccggggccagggcgatcaccacctcccggggattggtaccccgcggggcggggccctcctcggtgatctcgagctggtcaccggatgcctcggtcagcgacggcgcggtggccatcgcggtggcgcttcccgcaccggtgccctgtgcgtctccggcggcggcgaattccttgaccacttcttcaatgatggtgcgcagtgtcttctcgtccatcgtcatcacctcagatgctctcgggactgatcgcctggcgaatggtcttcaacttgtcccatcgctcatcagtcatctggtagccggtgccgggcccgcggtaatcgttcgggtagttcaccgcgctgatcacttggaagtcctcgttgaggattgccgaggtgtgcaggtagtcgccggcaacgcgctgcttgagcatgttgtagacggaattagcgacatcctcgaacccggcgcgatccagggcgaggacgatgtccacaccggtgatcccgcgcttcatgaggtcctcggcggccttcaggtcctcgaccacattgcgtgccggcatgtccttggaaccgcgcgcataggtggcggcctccacctcttcatcggtcacctcagtgagtccgagttcgcggaagatggcctggatcacccgggccgccttgttgcgcacccgcaccacgtcctcctcgaccacgggctggagcccgccgtcgatcttgaggtcgcgctggatgatcagccagtcgtcgtagtcgtcggcgtcccagttcgatccggcgaacatgttgtcgtagttcggggtggccgagtagcccgagcagatgaagtcggtgccgggcacgaactgcatcagcgagcgcgcaacgcggcgcagatcggagtgggtgaacgtctggtcgttcgacgaggcgcattccaggtcgaggctcatggcaatgaggttctcggccagcaccgcgcggatgccgctgggcactgcggccggaacgccgatgcacgacaccgaaccattctggatgccctgcgagccggcgcccttggtgatgtagaggcagcgggcctccaggtagagcatcgacttgccctcggctgcgcccatctgcacctcggagccggtgcccgaggtgaagcgcatcttcaggccgcgcgacgcgtagcaggaggccaggaaggacttggaccacggcgtgtcgtcgccgtccatgaacacctgctcggtgccgtagaccgagacggtctcggcataggcggtgaagccgcgcatgcccagggccagctcggtggcctcctccaccgaacactgggtgaggatgccgggacgacccacctgcgagcccaccatgttggcgatggcattgaagggtgcatagcgcacgataccgacggtggtctcctcctcggcgaagccgcgcagggcgccctcggccgcgtcggcggcgatctggaccgggttgtccttcaggttggtgacgtgcgcctgattggccgggaacagccgggcacgcatcttggtgacggccatcatcatctccagcaccgacatggtgccgaccacctcggtgatcttggccggagtcatggccgtggtgagctgcaccacttccgcacgcggaacgtggaagtccatcatctgccgggccagctcacgcgagtcggtcttgcagacctcctcggccttgtcgagccggattccgtagtcggcgatgaaggtgtcgatcatgtcgaagtcggcgcgctgcttgccgtcgagctcgacgaccaccccgtcctcgatccggatcgagggggtcgggtcgttgggcccgttcatggcgatcaggcccacctcgggccattccgtgacgtagccgtcctggttgacagggcgggcgtccagtgcctcgaaacgcttgcttttcacgaagctgcctcgtctcagatgtagggcgtggtggttgacgtgggaacgtcgcccatggcgccgaggagttccaggccggtcgcacgggcggcgatgatggcctggcggactgctccggagtcaccggtgaaacacgagatgacctcattggagtagctggtgccgtgggcggggctggagtagccgatcacgtcgatggtcgatgccttgacggccgtgtcggccaggaccacgccaatggcggcgggtgcaccgacggtgattccgaaggccttgccgacgggtgcgccgaaggccttgttgagtgcatggctggcgcgcgcggtgtactggaactccaggtgaccggcatcgttgccgtagacgtcaccgaaggtgcggtccagctcaccgagggtgacctcgacggcgcgacgcgcgtccgagacgtcctcggcacccaggatgatgagggagccgtggccggcccctcccttggtgtcgcgggccagctcgatggacacgacctcggtattggtggccttcacgccctcgtcggccgcgaagatgtgcgggccggcgccggtgcggtcaccgatgatgccgatcgagcggtacttgggatcgatcttcatcagggcgtggatctgcggatccacgttcgggatgaccaggccgatggtatcgccgagcgccgaggtgccgacgaactccgtggcctcggggcgtccgatggatgccggcacgctcggggcggctgcacgcggtgcggcagaggcgggctcattgccgatcttcgccatcacggccgacatgatctggtcgaccagttgctcattcgccatggttgatcacaacctcacttctggtccgcgaacgacgggaggatcttctccacgtcggcgtgcgggcgcgggatcacgtggacggacacgagttcgccaacgttctgggcggccacggcaccggcatcggtggcggccttgaccgcgccgacgtcaccgcgcaccagcacggtcaccaggccggaacccacgcgctggcttccgataagcgtcacattggccgacttgaccattgcatcagcagcttcgacggccgggacaaaaccctttgtctccaccatccccagggcatcttgcattccgaactccttcattggatttggtcggatcgccattcacaggtccggcgaccctgccgggcaataccccgagactagatgcgtggatagggtgaaaatcgcacatcgactgtccaatttccgcgcacctgcgcgagcctccgacaacacgaaagtgcaagtcccgacaagaaagtgcacctgtggcgatggcagggagcttttccgtgccgatggcggcccgcgacgcctccgggcaccgatcaggcacgagaatggcccttagacctggtggctgcgtcgccgggcacccggccctcaggtcatgcacccaggaaggtcattgaatgtcggacaagcaacgcatcatccaggagttcgtcccgggcaagcaggtgaccctggcccacgtggtcgccaatccggatcccggcctctacccgaagatcggcctgcccgcgggcaccgaggcactcggcatcatgacgatcacccccagcgaagcgtcgatcatcgccgccgatgtggccacgaaggcctcggcggtgtcgttgggtttcgtggaccgcttctcgggttccctagtcgtgctcggccagctgtcggacgtcgaatcggcgattgagaacgtggtggcggtgctgtgcgatgagctcggctttgcccgcccacccatcacgcgttcatgaagaagatcctgttggtcggctcggtcggtgccgggaagacgacccttttgcagtgcctgcacgagcgcgaacccagctacgcaaagaccgagacgatctacaccgacggcaccatcgtggacacgccgggcgaatacctggagatgccgttctacaagcatgccctgcggatggcttccttcgaggtggacctggtggtgctgctcgcctccgcgcaggtgtcggaggcgaagttcccacccgggttcaccagcttcttcatgccaccgtcggtgggcgtcgtgacgaagatcgaccttgccgaccaggtggcgatcgacatcgccacgtcacacctgcagatggccggcgtgacgcagatcttccccgtgtctgccatgaccggggccggaatcgatcggctcgcagcccgtctggcctagttgtactgaccggacacgttggttgaggagcgaaacgcggttcggtcctgttgtgagggagaactcctcaccgtcggacgaggagttcctgtgatgcgttgcaggcttgggcgaacacccttgggtcgccttggattgacgcggtgacctgcgctccttcatggagcaggtgcagcagggtcccagtgttctcgtcgccgctggcgatctgcgtgaacagggccagcatccaggctttctctgcccggatgaacttggtggcctcatggtcgctggcgccgatctcggaccacgcgttgacgaacgcgcaaccgcggggggtgctggtcgcccattgggcagtgtgctggtagacgatgtccaaggcttgagctggggaggcatcggtcaatgtttccaggagttcgccttgccaggcgtgggcgcgttgttgtaggtagcagacgatcaaccgatccttggatccgtagcgttggtacaaggtcctctttgtggtccctgcgtgctcgacgatgctgtcgacaccggtggccgtgatcccgtggtcgcggaagagttcggcggcagcatcgagaatccggcggccgaccggcgtggtgtcgacaggctcgaatacctcgaggtcgatgtccatgcttttgtcccctcagccgacggtggtgcactgacagtataccgaccggtgtgtttacctgactggatgcgacgggtcatgtgtgtagcgtttgtggtggcgtggagttccgggttcgtcggggcgacgctggcggaccggacaggcgtggggacgtggtccctgctggcctggcgttacctggcgaccgccctcgtactcctcgtcgggtgtctcctggttccttcactgcgccactctttctgcgcgctgggtcgacgtgaggtgttgcaacaggtcatcctgtccgtcttgtctcatgtgctcttcctgggcggtgtcttcctcgccgccgaagaggggctggatgccggcttgtcggcgttggtgtgtgcactccagccgctgatcgtgaccgtggcaggacgaatctttttcggtgaccgggtcagaatcgtccagtgggttggcttgctcattgccctgggtggcgtctccctgagcgtgggaggcatcagcgcagcgggggtgggaagcgtgggcctggtagcaatgagtctgctggggctgtctacggcctcactgctggaacgctcgtggaatccccaggtgccagtgacggtcagcctgaccgtgcaggtgagcgtcgcggccgtgatcttcagcggtgtcgccctcgtgaccggcggtctcgcactgcaggtcacgggagcactggtgctggccatcagttggctggttctcttgtcaggtctcggcggctacgccacgttcatctggtgcctacgccacgtgggagccaccacgaccagcactctgctctacctgactgcaccggtcacgatgctgtgggcgtggtgcatgtttggccagcagcccccgcccctgcagtggattgggctcgcggtcgtcctgagcggcgtcggcctcgcgacaagacgcaccaaccaccgtgagcaaggcacagcctgaccaccggccccaatgcggccggatcgtacgcaacgacaccacgtcaatatcaggagcaaggcttccatgacccacacgaatgctgctctcacaccgcgccaccggctgatcgtcgctcggctggtcgtcgaggaagactggccggtcagcgaggtcgctgcccggttccaggtgtcttggccgaccgtgaagcgctgggccgaccgctaccgggccggccagtccatgtaggaccgctcctcgcggccgcagcactcgccgaacaagaccgaccaggccaccacgcggtgctgtatccagctccggctacgtctgcgcgaggggccggttcagctcgcgtgccggctcggcgtcgcgccgtccacggtccaccggatcttggtcgacgcccgcctgaaccggctgtcgaacgttgaccgcgcgactggggaacccgtccgtcgctacgaacacgatcaccccggggccatgctgcacgtcgatgtgaagaagctcggcaacatccccgacggcgggggctggcgttacgtcggccgccggcaaggcgagaagaaccgggccgccacgcctgacaaggccaagaacaagtggcgggaccctttgatgggcaaggcctatgtccacaccgccatcgacgaccactcccgtgtcgcctatgccgaagtgcacgacgacgaaaccgccttcaccgccgccgctgttctggtgagggctgtcgagtggttcaacgcctgcggggtcacggtggagcgggtgctgtctgacaacggtggcgcttaccggtcgcacctgtggcgagacacctgcgccgagctgggcatccggcacaagcgcaccaggccgtatcgaccgcagaccaacggcaagatcgagcgcttccgccgaaccctgtccgacggctgggcctatgcccgctgctacacctctgagacggagcgccgcggggagctcgagggctggctgcacaactacaaccatcaccgaccccacacggcttgcggcaaccagccacccttctcacgattgaccaacgtctccggtcagtacacctagtcccggcaccctcccggcgccctccggggtggaccgtacgggtcggcggggactagagggcgtgggccaacagcccggcgagctcatgagggtcaccggccgggggtttcccgatgtgcagaagtcgcgcaatgcggtctgggacagctgtggaatggcagcccggaaggcggcgcggtcgacgccggcgtcggtgagcgaggccggcatgtcaaggtcacgacgtatggcggtgatgaagtcgacgagccccgtcaccagtccgcgtcgggtggccgcgtcgatgccgatggccgccgcgagctgtgcatagcgctcggcgatgggcgacaacgtggcagccccgaagcccagctcgccggcgttgaagccgatcacatgcggcatcaggatgccgttgagcctgccgtgcgccacatggaagctgccgccgatggcatgggacaacccgtgcacgatgcccagtccggagttctcgaaggcgatgccggccatcgtcgccgcattctgctggtgttccccggccgcaaggtcgttcccgtcgcggaagctggccaccaggttcgcgctgatcagtcgcagcgccttctcggccagtgcgtccgtgatgtcgttgtggtccagcgcaacataggcctccaccgcgtggctgagcgcgtccatcccggagtcggcggtgagcgtgggcgggcaggtgcgcaccgcgtcagggtcgaggatggccacatctgccaccatgtcgggtgaggtcatggggagcttggcgtcgtgctcgggatcggtgaccaccgcgaacgagctgacctccgacccggttcccgaggtggtgggcaccacatagaagcccgccgacagtggctggccctgctcgagggcaatcttgcgcaccgccttggcggtgtcgatcggcgatcccccgcccagggccagcagggcctcgggggcgcagtcaaggaaggcccgcaggccgcgcgcgacggcctggacgtcgggattgggctgcacctagtcgaagaccgtgatctcggcgctgccgaggtggccgcgcacggtgtccatcagtgccgaggaggcgatgaaggcgtccgtgatgaccaagacgcggcgtccgccgagcctgtccagcgcggtgagtgcgtcaggcccgcaggcgagagaagtggccagttggaattgcttcatggagcggtctccggtcgaacgatgaatgctgtcgccggtattcgctgggcgacatccccgttcgggaacggaagaccctggagaagtagttcacctggctgaaatccagggtggtcgcgatttcacccaccggcatctggggggacgctagcatcagctcggcccgttccagccgccgtgacatcacatatgacacgaatgtgtcgcccgtgaccgatttgaacaacttcgacaggtgccccggggaccagtggagctttcgggctgcctcggtcagcgacagcgcgcgggcggggttgcgggcgatgtcattgatgagatcgcgcaggttgtgctgccgttgcggacgggtgcggagcacctcatcgaggatcagggtggccagccgttcggcgtgcagctggctcgtgtagcggcccggatgggcgccggcaccgcgtcggtgccgcacgatggtctcctccaagtgtggcgcgaggcgtggcgcgatgtcacgggccacggccaggagggcctcgtccagtgcctgcaccccctccagcacatcggtgctcggaaccggatcgaaggcggcctgcaactgcaccgagatctcggcgaccgtgcccgcaaagtcctcggccaacagagccgttcgaaggatgtccgcactgtcgctcgcaggagcgtcggaatcggcctcatcatccgcggcccgggccgacgacgtgttcgggttgggtgtgaaccccgcgacaatatcggtgggaaccacgctcagtccgcgcagggcggccccccgggcctggctctgggccactcccccgctggcctgatcatcggacaggaacaaccgcagctttcccgaatagccctcgaccccggcacgcaggccgagcagggtctgggcggcggcctgtaccctacggcgccccaccacgggtacctgctcgtagtactgctccagcgtgggatcgccccgccatggtgaatcacccatcaggaaatcaggctgttccagctcagggaccctgtcctgaccacacaggatcgccccgacgtagctgttctggctggtgatcggcaccgaaaaatcgaccaatccggcatggcagcgatagatctgcgtggtgccgtgagccagagactggaggccgccataggcatcacagccgtggcacagtgtgcgacgcacgggatcttagcggattgcgcgacagaagtcggtgaatgcgcacatctcggtgaccggcacgccctgggcatcgacggcgaccgtggcgaagccagtggcctcggagaagtcttccagggtcttcgcgagggcggcgacatccatcaggtcgaccatgcgcttcagagtcatcggggcccctgacgtccttgtccaagttgccttgatactaacagcacggccggcgcggttcgaaggtgactctaagcatctcccatcatgcggaatatgggcggcgattcggcgccggcggatgacccggacggcatggcggtgaggactagtttcggcgttctcagccgcggggaatgaggggcagcgagcgcagctggtgctccaggtgccatgacgagaaggccgcgatcagcccggacacctcgcgttgggtgccctcgccaacggtgcgcgtggcgggccagtcaccgctcatgagggccccgaggagctgccacgattccggctccgggcgcgccgagccgggtggacggcaacccgagcagaccatgcccccgatggagggcgagaaccactcctgctgccccatcacgccacacttggcgcaggaatccagcacgggggcgtagccggccaccgccagcgatcgcaagagataggaatccagcaccatcgtggccgggcgcggtccatcgttggtgccctgtccgagcacccgcagggctcccacgagcagtcggtactgctgcagtgagggctcgttctccaccgcgaccaggcggtcggccacctcgagcatcgtctcgccggtggtgtagagcacatagtccctggtgaggggatcaccatagggatgcaggcactccacctgcgtcacgatgtcaaggctgcggcccaccgcgaactgcacgtccacgtggttgcacggctcgagcctgccgccgaacttgctggacgtgcgtcgcaccccgcgtgccacggcacgcaccttgccgtgcgtgcggctcagcagggtgatgatgcggtcggcctcgcccagcttgtgggttcgcagcacgacggcttcatcacgataggtgggcacgtcttcattgtgcgttgcccgcccaaacggatcgtcgcgccacgtcgggcgaccacccactagtgtcggatcgtggccacgagcactcctcatccagcccatcgggcgcccgacccgcatcccagcggggcgcgcccacccgccctgcccgccaaggcgctgccccgtcacgtcgccgtggtgatggacggcaatgggcggtgggcaacccagcgtggattgccccgcaccaagggacatgaggccggggagtcggcgttgttcgatgtgatcgcgggcgccatcgagatgggaatcgactgcctgtcggtctacgcgttcagcaccgagaactggaagcgctcccccgaggaggtccgcttcctgatgggcttcagccgttcggtgatccatcgccgcctcgacgagctggatgcctggggggtgcgggtgcgctgggcgggtcgccgcccccgcctgtggcgcagcgtcatcacggagctcgagcacgccgaggaacgcacccggcacaacgacacgctgcagatgcagttctgcgtgaactatggcggacgcgccgagatcgtggacgccgcccgcaagatcgcggccgccgcggcggccggacggctggatccggcccacctcaccgagaagagcttccaccgctacctggatgagccggacatgcccgacgtggacctgttcgtgcgcagctcgggagaacagcggctgagcaacttcctcatctggcagagcgcctatgccgagctggtcttctcgcagaagctgtggcccgactgggaccgccgcgacctgtgggacgccgtcagccggtatgtgcaccgtgatcgccgctacggtggaacggattccgccactcagggtgcatagccggttgccgccacgttgagatgactggaacgggtcgagggcccgtgcttgactcgaagtatggatatcgagatcaaacgcgtctatgaacccgcctcacccgatgatggttatcgcgctttggtcgaccgattgtggccccgtggggagtcgaaggtgcgcgccgagctcgacgaatggtgcaaggacgccgcgcccagcacggacctgcgcaagtggttcaaccaccaggaagagttgttcggtgagttcaccacgcgctatcgcgccgagctggacgcatccagcgagcccgccgccctgctgaagcgcgccgaggcttcgggcaagtcgaagctgacgctggtctacggcgccaaggaccagaaggacaatcaggcggtggtgctgcgcgactacctgaatggcttgcagtcgaagtagccgtcgcccgccgcaccgggggcaccacgcccagcccactgctgcgcgaggccggatcaggcccggtcgagcgcgctcaatgccgccttcagggtggcggtggtgatgtcgggatcgatgcccacgccccacagcacctgggtgtcgtcgccctcgcccacctcacattccacataggcggccgcataggcgtcgccgccggaggtcagggcgtgctcggtgtagtcgagcacgcgcacgtgggcgcccacctggcccagcgcgtcgatgaacgccgacagcgggccgttgccctccccggtcaccgtggtctgcttgccgcgcacgtcgaggtcggcggtgatctgcgtctggccgtgggcggcaccgacggtgaactcgcccagcttgaagggggtgtcgcggctgaggtactcggaatcaaagatgtcccacagcaccgggctggtgacctcgtggccggaatcatccgcccgggcctgcaccacgccactgaactccatctgcaggcgacggggcagctccaggtggtgatccgccttcatcaggtaggccatgccgcccttgcccgactggctgttgacgcggatcacggcctcataggtgcgccccacgtcctggggatcaaccggcaggtagggggcctcccaacggatcttgtggatcgaggtgccctccgccctggcccgggtctccaggtcttccaggcccttcttgatcgcatcctggtgcgatccggagaacgccgtgtagaccaggtcgccggcatagggggaacgggccggcaccggcatcccggtgcagtactcgacggtgcgccggatggtgtccatgtcggagaagtcgatcatcggatcgatgccctggctgaacaggttcatgcccagggtcaccaggtcgacattgccggtgcgctcgccgtggccgaacaggcaaccctcgacgcgttgggcgccggccatctggcccagctcggaggctgccacggcgcagccccggtcgttgtggcagtgcattgagatgcacacattgtcacggtgcgagatattgcgcgagaagtactcgatctggtcggcgtaggtgttcggcgtcgacatctcgacggtcgccggcaggttcaggatgatttctcgttcatcgtcgggctgccatacgtccatgacgcgatcgcacacctcaatggcgtagtcggtgggcgtctgggtgaagatctctgggctgtactcgtagccgacgggcgtgtcgggcaggtacttctcgatggcgtcgatcacccatcgggtgccctgttgggccaggtcgatggtgccctgttgggtggtgtggaagacgacgcggcggaacagctcggccgtcgcgttgtacatgtggacggtggcgcgcttggcgccgaccagcgactgcaccgtgcgatcgatcaggtcctcacgggcctgcgtcagcaccgagatcaccacgtcatcgggaatcgcctcggggtcctcgatgagcgagcggacgaagtcccattcggtctgtgacgcggacgggaagccgatctcgatctccttgtaccccatcttgaccagcagatcgaacatcttgcgcttgcgggccggggtcatcgggtcgatcagggcctggttgccgtcgcgcaggtcggtggacagccaccgcggcgccttggtgatccgctggtccggccatgtgcggtcgggcaggctcatcggatggaagggctggtagcgctcgtagttcatgccgctgggcgtcgcgacgggctgggagagcccacagacgtgcggggcggcgaagctcttgggaggctggaaggtggtggacatgcgaatcctcttcggggatatggaagacccggggtcgcccgggcgccgacgcgtcagaactccgcagcgaggatggccagctagaagaaacggccctcgctgcggcaaccaaggaggagacccatcgggcacgccgcaaacgtcacgagaattactgtagtcgcttgccgcgtgccgatggcaatgtccagttatcgtccgtggcgcacaccggggtgggcgtcggctttgatggggcgcatgatgtttcgacacgcccgtctgctcgacctcaccaccggtcgggtcggacttccccacgacgtgttggtcagcggcaaccaagtcaggcggggcgggccagccatgatcgctcccgacgacgaggtgatcgacctggagggccgcatcgtcatgccgggactgtgggactgccacgtgcacttcgacctgtgggcagcctccaagacccgcctggacgtctccggatgcgtctcggccaatgacaccctgagccggctggctgcctccatcacccaactgcccgcgggagcggccctcatcgccgtgggcgcccgcgattcacagtggcccgaccggcccgatacccgtgagctggacgcgatcagcggtaaccatcccgtcgcggtgtacatgaacgacctgcactcggtgtgggtgaacagccggggcctgcaacagtggggcttccgcgaccgggtgaccggcaccgccagcagcggcgtgctgcgggaacaggatgccttcgccctggaggaccggctcgacgaggtggaccgggctgcccgcagccgggcactgatcgacgcccagtccgaggcggcggcccgcggggtggtcggcatcgtcgacatgcagacggggggccatcgcatcgacgcatggcgcaaccgggccgcctcccccgaccagcggctgcaggtgcgcatcgcctgttggccggacacggtggatgactgggtggccaccggactggccacgggcgcactgctcgacgacgaccagtggctcaccgccgggccgctcaaggtgatcgccgacggctcggtatcggcccgcaccgcctggtgcacggagagctatcgccgccccgcccccggcatcgacccgcacggcatggccgacatcagtgccgcggagctgagcaggctgatgagcctggccgaacgcagcggcatcgaggtggcggtgcatgccatcggggacgccaccgtggccagggtcctggaatgctttgccgagaccggcgcgcacggaacggtcgaacacgccaccgtgatgcacgacgccgacctggcccgcatggcggacctcgggttgaccgccagcgtgcagcccgcccagatcatcgccgaccgactcgggttcgccgaggtgtggaccgagcgtccccgccatgtgcacgccctggcctcgatggcagcggcccgcatccggttggtcttcggctcggacgccccggtggccccactcgacccatggctggcgatctcggtggccgtcacgggcagggaacccggatcggccgacggcgcctggcagcccgacgagacactcagcgtcgggcaggcactgcgcgcctcgacctccggcatcaaccagttggtccccggcgggcgcgccgacctggtggtgctcgacgatgatcccttcaccatccagccggaggcactggccgcaatgcgcccctatctgacgatgtcgcgcggccacatcacccatcgcgccgacgcctgacctctccggacccgggccgcgggccaggacctcgtggggccatcccgggcggcgatcactgcggcatggcaagggggcgggcaggaccattgctggtcctgcccgcccccttggccttcagtgcgtgacctattcgcccgttccgggacgacccaggtagatgacggctgcgacgaccgcgccactcagcacggtgcaccacagcaggcaacgcagcagcttgtgcttcttcttaccggttacctcttgtgacttctttgccattgttcttcctctccttggtgtgacgccgctgaaactgcatccacattcttgcaaccactttgtgagggccatggcagctgccatcgccgcgggcggtgagcgcactgttatcagcgcgactcgatgcccctcacaaaatcaacaacccgatagcggatctgtgccgagatgccgcggagcagctcgtcctcatcactctcgcgcacgctggtgaatccgggccactcgctcacagtgatctccccatcggtcacgccatgacggcaccgcacggcaccgtcgacgctccacaccacgctatcgtgcccggaccatgcgaagacggcgggatgcgcatccccggtcgattcgtcgatcaccgagcattcgatgggctcatgcttgtcatgttcggccaagtagctggccacggcgaattcggcccacatgggaacgcagaaggccggcatctggtcggtgcgtcccacgtcgagcagggtgccgtcgacgatgtggaaactgtgggtccatgtgaacggattcgaattctggcactcgatccgcgaactgacctcatgaataccgccctgcggggtgggaaccaccagcagcgtcaacacattggtggagccgatgtcatggacggccgcgcccaccttgttgccccgggcatcatcgacgcgttcatagaccaccttggtgccccatgcctgcctacggctgcgtccgaatagcgtcatcttgcgcacgacctttccgccatcaaccgcctgcagccattatgggcgctcagaaaccgaggcggttcaactgctttgcatcgcgttgccagtccttgaccaccttgacgcgcaggtcaaggtgcacctgggtgcccagcagcgcccggatctggcgccgggcccgcacgccgatgcgcttgatgcgctcaccggcatggcccaccatgatcccgcgctgcgaatcgcgctcgacgatcatcgaggcgaagatgtcgaccagtggacggtcggccggccgaccgtcgcgcagcatcatctcgtccacctcgacggcgatcgagtggggaagctcgtcacggacctcctccagtgccgcctcgcggatgagctcggccacgagggtctcgtcgggctcatcggtgatctcaccgtcggggtagtagtcgggacccgggggcatcaggctgaggagcacatcggccacctcccccacctgggagcccgaccgggccgagcagggcaggatgtgggcgaaggtgatggccaggtcgtcctgcaacctggcgacgcgcagcaggtgcttggccagccgttcgggactgaccagatcggtcttggtcacgatcgccaccagggtcggcggcttggcgagttcggcgagctgggttgccaggtagacgtcgccgggaccgatgtgctcatcggccgggaacaccagcgccaccacatcgacctctgaccaggtggaacgcaccagatcgttgagacgctgttgcagcagggagcgcggcttgctcagcccgggggtgtcgatgatgatcagctggccatcggcacggtggagcacgccccgcacggcatgccgcgtggtctgcggcttgctgctggtgatggcgatcttcgaacccaccagggcattggtgagcgtcgacttcccggcattcgggcgtccgacgaagcagacgaatccgctgcggaactcctggctgcccgcgggctgttggtcagtcatcatcatccttctgatcgggggatggctcgggttcgggttcgggttcgcggctcaccacgatggtgtcgatctggtggcggcgcccggtggccttctcggccacgaagcgcaggcccttccacaccacctcggagccgatgatcggcacccggttcagctgtttggccatgaggccaccggcggtctccacgtcctcgtcgtccagctcgaggtcgaacaggtcaccgacctcgtcgagcggcatccgtgccgagatgcgccagcgaccatcgtccaattgttcagcaagatcgggttctgcgtcatattcgtcggtgatctcaccgacgatttcctccaccaggtcctcgatggtggccacgccggccgagccaccgaattcgtcgacgatcacgaccatgtggttgcgggtggcctgcatctcggtcagcaggtcgtccacgggcttggagtcggggcagaagacggccgcacgcatgatctggtcgacggtctccttctgatcggcctcgggattgtcgaagacccgcttggtgaggtccttcaggtagacgatgccgcgcacgtcatcgaggttgtccccgatcaccggaatgcggctgaacccggaacgcaacgccaggctcatgccctggcgaagtgtcttgccggattcgatgaacaccacatcagtgcggggcaccatcacctcgcgcaccagggtgtcgccgagctcgaacacggagtggatcatgtcgcgttcgccgtgttcgatcacctcggccttctcggcgatgtcgaccatctcgcgcaactcggcctcggagctgaacgggccgtcggcatagccacgcccgggtgtcagggcattgcccaccaggatgagtccgctggtcagccagccgaagagcgaggtgagggccccgaggggccgggcggcacggacggccgtctgttcggcacgctgacggcccaaggtgcggggcatgacgccccacacgatgaagtcgatgatggacaacaccagcagtgggatgccgatgcgttcccagtcatgatcgaaattgtcgaagaccaccaggcagcccaggatcacggcaccggtctcgcagacgatgcgcagcaacatggcggtgttgatggtcggggccggatcggcctcgatgtcgagcacccggtcagcgccccggatgccgtcggccaccatgcgctccgcgcgcttgcgcgagacggtctgcagggcggtctcaccagcggcgagcatgctgccgaagacggtgagcaccaccgcgacaatgatgaaaatccagtccgtctgcgtcacgatgaagagtcaacacccatctgttcggggttcaggaccgaacccggaggtgagttgagtctatggcacgcccgtgcccggtgatatggcgccgtgcgtgcatggttcggggccccgggcacaccgcagcgggcacccaccgacgcgtccggctcagtccgaaccctgctcggcccgccaatcggcaatgatccgatcgttcagcccgaacatcacagccttctcgtcgggctcggcgtgatcgtggcccaacaagtgcagcagcccatggatgagcaggtactcgatctcttcctggttggtgcgcccgttcccgggggcctgggcgctggtgaaggccggacagatcacgatgtcgccgagcaggccacgcggtggtgcctcgccgtcggccggctcgcgcagctcgtccatggggaagctcatcacgtcggtgggcccgtcgaggttcatgaactgcttgtgataggccgtcatggtgtccacgtccaccagcaggatcgacaggtccgcctgcgggtggatgcgcaacttgtcgagcgcgaagcgggccagtcggatcagcgcctgggtgtcgacctcttcaccggactcattgctcaggtcaatcatggacacagcctagcgacgccacagccacgcgcggtccgctcaccgctcgcgcgaagcggcgttgcgacgggaatcgaagcggtcataggcagccacgatgcgacccaccaggcgatgacgcaccacgtcgcgattcgtcagctggcagaaggcgatatcgccgacgccgtcgaggatgctctcgacctgtcgtaggccgctcggcgctcccccgggcaggtccacctgggtcacatcgccggtgacgacgatcttcgagccgaagcccaaccgggtgaggaacatcttcatctgctccgggctggtgttctgcgcctcgtcgagcacgatgaaggcgtcattgagggtgcgtccacgcatataggccaggggcgccacctcaatgaccccgccggtcagcagcttgggaacgcgctcgggctcgaccatgtcgtgcaatgcgtcatacaggggacgcagataggggtcgatcttctcgttcagcgttccgggcaggaagccgaggctctcgccggcctcgatggccggacgggtcaggatgatgcgattgaccttcttggactgcagcgcctggacggccttggccatggctaggtaggtcttgccggtaccggccgggccgatgccgaaggtcagcgtgtggttgtcgatcgcgtcgacatagcgcttctggttcagcgtcttgggccggatggtccgcccacggctggacaggatgttctgggtgagcacctgggagggggccacctcggggtcggcgctctccatggacacgatgcgttcgaccgcatcggtggtgaggccctgcccggtgcgggtgatcgtgatcatctcggtgaacacgtccgaggcgagctcgacgtcggcatcagtgccggtcaacgtgatgcgatttccgcgcaccaggatgtcggcgtccaactgcgattccagcagtcggaggaaggtgtcgctggggccgagcacattgaccatctccaccgacgcgggaacggtcagcgtgcgtaccgagtcggaatcgccggcatcggcgcgttgcacatgcatgctagtcagggcggttgtccctcatctctgcgcaaaaagaacgatcaaccggaggctccggttgtccccaagtctacgcggtgctggccccgaccacggtggggatcgggaccagcacgatgcgggtgtcctcaggcgtcgacgagcaccgattcgggcacctcgccggcgggcttgtcgcggccgatggcgtcaaggtcgaggtcgcgcgtctcgtgggtggtgatcagggcgatgagcgtcaacacggccatggcgaccaggtagaggccgacgctgccgggcccgaagcgcgccgcgagccaggccgcaatgaacggtgccaccgcggcgccgaggatcgacgacacgttgtaggagatcgccgaaccggtgtagcgcacattggtggggaacagctcgggcagcagcgcggactggatgccgaaggtgaggcccatcagggccatgccaatgagcatgaagaccgtcatgagcaccaggttggccgagctgccggtgcccatcctggcgggatcgaggaagaacccgaagctcaggccgaaggcgatgatggccaccgtgaccacgagcaggaagcgcttgcgcccaagcttgtcgccgagcaggcccgagatcggaatggtcagggcaaaggcgcagatggtgatcagctgcaccaccaggaacgagtggtagctgatgcccaggtagccgagcgccaccttgccgatggcgtaggagaggatccaggtggtcatcaggtagaacagcgtgtaggtggccagcatgatgaaggtgccacggatcaggtcgcgccacgagctgcggaagacctccagcaccggggccttcaccacctcgccgcgatccttggtgcgctggaacgacggggtctcgtgcagcttgaagcgcacgtacaggcccaacgcgacgatgacggccgagaagaggaagggcaggcgccaaccccaggccaggaaggcatggttggtggtggcctgggtggagtcgtagttcatcgtcatggtgagcatgaagaagaatccgttggccagcaggaacccgaacggggcacccagctgcggccacatggagtcgaagccacgcttgccggcgcgcgagttctcccccgcgagcagcgacgcgcccgaccattcgccgcccaggccgaggccctggcagaagcgcatcagggcgagcagcatcggcgcgacgatcccgatggacgtgtaggtgggcagcagcccgatgagcacggtcgccacccccatggtgagcagcgacgccaacagggtcgccttgcgtccggcgcggtcaccgaagtggccgaacagcaccgatccgagggggcgcgccacgaaggcgacgccgaaggtggccagcgaggccagcagggcgccattgccacccgaggagtggaagaacagcagcgggaacaccgagatggcggccgttgcgtagatgtagaagtcgtagaactcaatcgtcgttcccaccagggaggagacgatgatgcggcccttgtggttcaccggggcaggacccgggtgggcggggtcttcagcatgtgttttcgtcacgacgaagacggtacgtgacaatctcacgccatgagacccagaatcccgcccactgagacgattgggtgatttgtgcgttaccggcgaaccgcacggggctgccgaggggccgcggaacgctcactgcgcgaggcgagcagctcccccgttcggggccgggtgcgcggccttcctgatcctcctggtgcggcccatgatgatcacacccaccaccagcagcgcgatggacccggtgaagtcgagcacgttgaaggtgtcgtcccacatcttgcggccggtgaaccgtaggtagtgcgtcgatccgatcagcatgacgatgatcaacagggccccgcaggcgtattggttctgcgccgtggggtgccggcgcgccatggccatgacgatgacggccagcgctgcggcgccgaagaagtccacgtcgtggtagtcggcgttcccaccgcgaccgccgagcagcgatgcaagccgcaggacgacctcggccgcgagaagcaccacgccgacgaccttcggacgccgcagggcccgcgcgacgagggcggtggtcgactgctccgggaccatgcgggccgggccctgggaactgagatcttcgctacttgtggtcatctggtccaccccctgggatcaccgccgcagcggcgcgatcaatggtgtcggggaactagccgcgggcggccaggcgatcggtggccaacaccaactcggaggtgatgttgggttcgaaggccgaatggcccgccatcacgacgcggtagtcggcgcgtggccaggccttgtgcagctcatggctggtggccgcggggcagcacatgtcatagcgaccctgcacgatcaccccgtcgatgtcgccgatccggcccgcctgttcgatcagttggttctcgcgcaggaatccgtggtgggcaaagtagtggttctcgatgcgcgcgaacgccagtgcggcgtccggatcgctggattcctcgacgtgctcggcgctgtacagcaggctcgacgtggcggcctcccaccgcgtccaggcgagtccggccgcccgtgcgagctcatggtcgtcgctccacaacaggcggtggtagccgacgatgttgtcgccatcgaggtcgaagccggcgcggcgcagcggcgccaggaagtgctgccagtgctcggggtagaccatggaggccccggcgttgtagtaccagtccagttcactgcgacgcagggtgaagattcctcgcaggacgagccagttcacccgttcggggaactgctcggcataggccagcgacagggtgctgccccaggatccgccgaacacgccccacagctcaatgcccagttcggtgcgcaggcgctccatgtcacccaccaggtgggcagtggtgttggacgccatctgcgcggcatcgtgcaactgggacacatgcggggtggacagcccgcaaccgcgctggtcgaagccgatgatgcggaacaactcggggtcgaagaatccgcggtagtcgcggccaatgcccccaccgggaccgccgtgcacgaacaccacggggatgccgtcgggattgccactctgctccacgtgcagcgactggccgtcacccacgtcgagcatccgctcgtcatagggctcgatatcgggatagcgcacccgctggggacgcaccaccgcgccggcggtcacatcatggtcggcgcccgatgccaccggggacagcgtcgaccgctggggactggacacagttgctccttcgttgtcagatcacgcaggcccgggggatgcggcacaggcgcgacgagcggcccgtgccagccccatggatcaggactggtcctcgtccaacttctcggcggtgcccgacccgtccgtcgcgggatcgttgttcacggtggcgtcatcggtctgcacatcgtcatcatcatcgtcggactcgtcgtcggtctcgatgatgtgcatggcagcttcctcggcgctggcagcaccgccggaaatcccgacatcagaggccacggattccgattcggtgtcctcggcatcgatgccaccgcccgcggccaccagtcggccggcgcgcttgctgcccacctggcgtggctcgtgatcggggttccagtggtgttcgggggcgttgggatcgggctcgggctcctcctgggtgaggcgctggtcaatcgtctcgttgcgggccatctccgaggcggtgttgccgaacccctgcgccggcgaccagtggtccggagggatgtagccctcgtccaacggatcagcgacgccgcgatcaatcagcgaatctgccggactcagctgggccagctccgtgttctcgtcgttctcgacgccatcgttgggtatcgcttcgtcggtgtcactcatgtttcgatcttgccacgaacccggccccgcatgcggccagcctcgccagttggggattgacatggcatgggtgcacccactgctagggacgcgttcgcccggccccggccactcaggcacgtccgggcgtggcgcccccgtagaacgaaccgaggaattcggtgcgcagggcgtcgaactcgccaccccggacggcatggcggatcgaatccaccagcctgatggtgaaccgctcattgtggatggtggccagcgtcttgcccaggaactcatgggccttgaacatgtggtgcaggtaggcgcgcgtgtagtgggtgcaggtgtagcaatcgcaaccctcctcaagcgcaacgaaggcgcgccggttcgcggcggtggtgacgttgtacctgccgcgggcggtgtagatcgcgccattgcgcgcggtgcgactgggattgacgcagtcgaaggtgtccgccccggccgcgcaggccgcgaacaggtcgtcgggttcgctgatgcccaacaggtgacggggcttgtcatcgggcagttcctcggcacaccaccccacgatgtcgcccaagtgctgcttctcgatggcaccaccgatgccgtagccgtcgaagccctcgtgctcgtggcccgggacctgtgcccgggtctggcgcaacccgcggcaggcctcacggcgcaggtcctcgtactgggcgccctgcaccacgccgaacagtgcctggtaggggtgcccggagcgggcgtcggtgagtcggaagtgctcgtcgacgcagcgctgtgcccaccgctgcgtgcgccgcaccgaatcctcctggtagcccctggtgttcatcaacgtggtgagttcatcgaaggcgaacatgatgtcggcaccgagctggtgctgcacgcccatgctcacctcggcggtgaaccgatgggtcgatccgtccagcgggctcttgaaggtgaccccgtcctcgtccacctgggcgtcgcgctgcttgccctcggcgatcacatcgtcgttctgcatgccggtgacgtccatggcgagcaccttcttgaagccgacgccgaggctcatcacctggaagccacccgaatcggtgaagctggggccgggccagttcatgaaccgaccgagcccaccggcctcgtccacgatgtcggggccgggctgcaggtagaggtggaaggcattggccaacacggcctgggcgcccgcctggtccatctgctcgggggtgacggtcttgacggtcgccttggtgcccaccaccacgaaggccggggtgctgatcgggccatgcggcgtggtgatcgtgccggaccgccccaatccattgggcagcacatggtcgacggagaaggagaaatcgcaggacttggcggcgcacacgccctcgattgtgacaggcgaggtgaaatccgggccgatccagccgccgccactaccgcaaagggccttgtcagggccactgtgcccgcatcaggatcgcggatggctggacgtctgcgatgcacggtaggttgaattccgtgcacaagccgttcgtggcaactgaccttgaggtgttgacgatcacgcccaccagcgccgtgatcagttggatcacccgcagccaccgcggacggtccctgctaccccaacccgcgttcaccgacacccaactatgggtgggcgacgccgactccaccctgcggctcgtccacgacgaccccacgccacgggccttccaccaggtcaccgtcaccggactggaacccggccgcgaatacggattccgcgcccgctcgggaggaatccagcccctgcccggcctgtacaccaccaaccgccacaccagccccgaacgcgtccaccgcttcgtcaccctcatccccccaccggggcgctacctgaccaccatcgccgtggccaacgacatgcacctgggcgagaagcgccagggcatcgtgctgggggcactgcccacctcggtggcacccgcccgcggtcaggccggctacccccggatgatgttcaccgccatgctcgacgaactcgacaccacccacgaccaccccttcctcgtgctgggcggcgacatcacctacgacggcaccagcgaccaggtcgcgctggcccggcagctgctcgccggctacggcaccagccaggacgactggcttgccgtgcgcggcaaccacgaccggccacgccgcgacggcaccgaccccttcggcgacgccttcgtcgcctaccaacacatgtgcgccaaccagacccccgagggactgcggatactgggcatcgacaccacccgcggcgggggcggcggatggatcctgcccgaccaactcgaccacatccgcgcctgcctggccgacgaacccgaccgccccaccctggtgaccagtcaccaccccgtcacccacgacgcggccctcacctcaccggccgggccccaattcatgttgcggtggcgtgaccgcctcgccgtgcagcgcctcgaacggcgcgccaagggggtcttcctgcaccacaccggacacacccaccggatgcgccgcggcaaggccgacgtgcagggctcccacaccgaatatttcgagaacgcggcctgcgccgcctaccccggcggctacgcactactccacctctacgagggcggctacctgctcaacttctggcgcatcgccacccacgccgccgaggaatggctgttccgcagccgctggcaggtcatgggcctcatgccccagctcaccctgggcacgaccaacgaccgcaaccacgtggtgctcaaggacctgtcgggcctgcacagcagcggcaagccggttccgctggagctacaggtctgagccgttgggcccgccgcgtgcggcgagtgcctggagctgggccagggcgacgactccggcagtggatgcgcgcaggaccgcgtccgacaggctgacgagccgtgcgcccgcgccccggaaggcctcaagttcctcgggactgatgccgccctcgggtccgatcacgaagacgcactcccccgcggacggcacgctcagccccgacagtggcgtcgtggcctcctcgtgcagcaccagggccaggtcggcccgggccaggcgctcgacaacgcccggggtaccggccgtggagacctgcgggatccggaagcgccgcgactgcttggtggcagcgcgcgccgacgaacgccacttggccaggcccttctcggccttggcctcccagcgcacgatgctgcgggaggcctgccaggcgatgatctcgtcaacgccgagctcggtcatggcctccacggcgatatcggagcgctcgcccttggccagtgcctggacggccaccgtgtgcagcgccgcgggccttcgggcgatcagctccccgacgcgcaccgagaccgagttcttggccaccgagtcgatgacgccgcgcaggcccgcgccggcaccgtcggccaccaggaccgactcgccgacgcgcatgcgcttcacggtcgcggcgtgacgaccctccggcccctcgatgagcaccacatcgcccggtccggcaccggcgatatcggccaggaagagcgggtcggtcatccggtgaaggccttgcgcagcttctcgaagaagcccttgtcgtcggcatgggtcttggcgatgccgtcgccgacttcgccccgcgcgtccgccagttcctccaacagcttgcgttgtgattcgtcgagcttggtgggcgtctgcaccacgatggtcacgccgaggtcaccacgctgcttgctgtcgcgaccacgcagtttcgtgacgccgcgacccttgatcgcaatccgcgcccccgattgggtgccggcgggaatggcgagttccacagtggacttcttggggtcggcatcggccagttcggactcaagggtcttgatgggcaccttgcagccgagcgccgcagcggtcatcgggatggtcagcatcatctcgaggttgtcaccgtccctggtgaacacctcgtggggctgcacgttcacctcgacgtagaggtccccggccggtcccccgccggtgccgacctcggcctggctgcgcagctggatgcggttgccggtgctcaccccggcaggcaccttgacggtgatgtcgcgacgggcccgtacccgaccctcacccgagcactcggggcagggatcggtgatgaccgagccgtagccctgacaggtggggcaggtggcggtggaccggatatcgccgaggaaggagtgctggatctgggtgattgatcccgaaccgtggcactgggtgcaggtcacgggctcctcaccgttggccgagccctggccgtggcagtggggacagaccacataggtgtccagcgtcagcggcgcctcggtgccgaaggctgcctgggcgagcgtgaggtcgaggcgcacgagttggtcggagccctggcgcacccgcgagcgtggcccacgcgtggtgccgccggcaccgaacatggccccgagcaggtcacccacgtcgaagcccatctggccgccgccgttgaatccgccgaaccctccgaaggggtcgaagccgccgccggcgccggcaccggcatgggccggatcgccaccacgatcgtagatcgacttcttctgcgggtcggagagcacctcgtaggcctcattgacctgcttgaacttctcctcggcatcaggatcgctggtcacatcggggtggacctgcatggccttcttgcgataggcccgcttgatctgctcggcggagacatcacgtccgatgcccagcacctcgtagtaatcactgctcatgagtaggtgaaatcaaccttccgccaggaactggccgacgtaacgagcgacggcgcgaaccgccgccatggtggacggatagtccatccgggtgggacccacaatgcccagattggcactggcctcaaaggatccatagctggaggccaccaccgaagtggtcttcaggggtgcgaagggattctcctggccgatgcgcaccgccacgtcaccgggatgatccgctgccgcctcgcccacgaggcgcaacaggaccatctgttcctcaagggcctcgagcaccggcttgacggtggtctcgaactcggcgccgaaccgcgtgaggttcggcactccgcccacggccacgcgcggggcctcgtcggtggccaacatgtcgagcactgacgcgacgacgctggatcccaaccgcggcagcggttgctcggccagggcattgagcgcctcgatggcgccggccggcggctcgccgtcgacggcggcattgacggcgtcgcggacgaactgcaggtcatcatcgctgtgttcgggcacgcggatgctgcgctggtagacggtgccggcactgttcaccacgatgacgatggccatttcgggcgacagggtcaccacctcgacgtggcgcaaccgggccgcgttcgactcggggtactgcacgatcgccacctggtgggtgatcacggccagcagtcgcacggtgcgacgcaccacgtcctccaggtccaccgccccttccaggaaggtggacacggcgcggcgctcggccggcgacaggggcttcacctgggcgatgcgatcgacgaagagccggtagcccttgtccgtggggatccgtcccgcgctcgtgtggggctgggtgagatagccctcctcctccagcgctgccatgtcgttgcgcaccgtggccggcgagacgtcaaggtgatggcgttccaccagggccttgctgcccacgggctcgcggctggcgacatagtcggtcacgatggctcgcagcacatccaatttgcgatcgtcgatcatcgtttcctcctgtcgcgtgttctgatgagcccggtctgcgggggcacgacccaatgacgtggcccgcccggccccgaaggccatattccactgcctgtccacgtcgcttggcaatccatgccctagagtgccattttactcctcggccgccagtgccggccacgcacgcgggcaggcccgtctgcccgcggcggacccgacgcggtgggtcccgaagagtaggccccgggcagcagacccgacgcagtgacgcgcggctcactcgcggcgcggccagccgctggcgacgcgacggcccgtcgccaggtcacgacatgacaggatcgccatcctgccgctgcccggtcggtagaggcgtccgtccaggtgcacgacgtcgccgccgagctcctgcagcatgagctggccgggcaggtgatcccacggcttggggaagcggtagacgacgaagtcgatggctgcggtgaccacatgcgggtagtcgatcccggccgagccgctggcggggatcaccggggcgattcgcccctcctcgtcaaagccgcgccaggcccggaaggtgctggccccctggggcggaacgtggatgggtgccgcgctgatccgttcgccattgcagtagaccccgccgccccgggtggccacataggccttgcccgcgcgcggctggtagatccaggcgccgacggtctccaccccgcgcagctcggccaccatcacggcgaagtcctccgagccgcgcacgaagttgttggtgccgtccaacgggtccaccacgaagcagtgcggcgccacgccgatggcgtccaactggccgggatcgacgaaggacccctcctcgccgaccaccaccgcatcgcgggcgccggcccgcaactgctgcgacagtgcgcgctcggcctcccggtcggccaccgtcacatagtcgccgggtgcctttgaatcgatctcgtcctcgtgcagggcacggaagcgaggctcgacgatgtcagcactgacctgcttgatgatgcccaacacctgatcggtgtccatcgtcatcactcctgttcaccgcccccacgagcgctcttgccatggtcgtgtgggcaatcggttgcgtcctgcggttgtcagctgtcctggtcgatgtggtcctgggtgacgaaatcgatcagcttctcgacttcccggacgaaatccatgtcgaggtcacgatatgtggaaaccctggcgagcatggcctgccaggcccggccgacgtctgcctggtcgatcctggcgtacggcttgtggcggggaatgccaagggcggcgagcgtgcccttcttgaagtcccggtccatcggcacgtcgggccaggccttgatacccaggacgtcgggcctgatcgtctgccacacgtcgatgaatcggtgacccgtgatcttcacatagtcgccgtatccggcatggcgcacctgggcggcaacccgggactccttcgtgttcgccacgagatggtcgatgaggacgccgaggcgccggcccctggccggttcgaactccgcgacgatccccagcaggtcatccatgccgcccatgtactcgaccaccacgccgacgtggcgcaggtcgtcaccccagatcttctccaccagctcggcatcgtggcgtccctccacatagatgcgcgaacccagcgccacatggggttgctcgtggctgtcggtgcgcgaaccggagggggtgcgcagcgattggctcgcaccgcgtcgcggcgggatgcgcagcgctacgggacgcccctccaccaggtagccgtattcgccgacggggaaggtgcgtcgtcgttggttgcggtcctccagcacgatcatgccgttctcccagccgaccacctcgccgcaatagccatctgatccgacctcgacgatcaggccaaggctcaggggcatgtcggtggtgcggggcttgccggcatgacgccagtcccccgacagcacgtcgtgtccgtaacgatcgtgtgcgctcacgcggcacaagcctaatgacccccggtgcaccctgtcgtcccgcgcgcaccggtgggcgggacgaccacggcgacccgggattaatcccgcgcgctcagtccagcaggtcgcgggtgaccgcatcggcaagcaggcggccctgcagggtgaggtggacccggtcgcccaccaccgtgaccagtccgcgcgacagcggctccgccaggcgcgcccgctcggtgccggtgagttcgccgaccggcagcccatcggcgatccgcagctccagcagcacgcgctcctcatggcgggtgggcgcgtcgatcacctcgaagtcctcgcggggacgggcaccctcgccgagcagtgccgcatagcgccgcgggtgcctgacattccaccagcgcacgccatggacatggctgtgcgccccgggaccgaagccccaccagtcgtcggaacgccagtacgccaggttgtggcgggcctcgtgtccgggcagcgcccagttgctgatctcatagttggccaggcctgcggtgctgagcatgcgttcggccagcaggtactcgtcggcctcggcgtcctcgtcgggcatggcgagctcgccatggcggatgcgtcgcgcaagggccgtgccctcctcgacgatcaggctgtaggcgctcaggtgctcgggtgcgacgcccagggccgcgtccagggtggcccgccagctgtccagcgattccccgggggtgccgtagatcaggtccaaagagacatcggggaatccgacctcgtgcgcccaccgcgccacctggagggcccgccccggggtgtggtgccggtccagccgggcgagcacctgctcatcggccgactgcatgcccaggctgagccggttgaacccggaccccagcaaggtctccagccgggcgcggtcgagcgtctcgggattggcctccgtggtcacctccgcacccggaacaaggccgaaggtgtcccgcaggtcggccagcacctcacccagctgcgcaggcgtggccatcgtcggtgtgccgccgccgaagaagacggtggacacggcgcgcccggtacccagggcccgggccgcagcagcgatctcggcgtgtacggccgccaggtagtcgtccatgttcatgccggcgagctggctgggcgtgtaggtgttgaagtcgcaatagccgcatcgcaccgcgcagaacgggatgtggacgtagaccgacaagggccgtgtggtcggggcgcgcagctcctcgtggggaaacaggtgccccccggggaatggtcccggggccgccgcgtcggacatggctacttcttcttggtcagttcgttgttcgtcagggcggccacgaaggcctcctggggtacctccacgcggcccaccatcttcatccgcttcttgccctgcttctgcttctcgagcagcttgcgcttgcgggagatgtccccgccgtagcacttggccagcacgtccttgcggatcgccctgatggtctcgcgggcaatcacccgggcgccgatggcagcctggacgggcacctcgaactgctggcgcggaatgagcttgcgcaggcggttggtcatctccacgccgtagctgaacgccttgtcgcggtgcacgatcgcgctgaaggcatcgaccggttcgccgttgagcaggatgtcgaccttgaccatgtcgctggcccgctcgccgtcctcctcgtagtccaatgaggcatagccgcgcgtgctggacttcagggcgtcgaagaagtcaaagacgatctcgcccagggggagcttgtagcgcagctcgacgcggtcctccgacaggtagtccatgccgatctgttcgccacgtcgggcctggcacagctccatcacggcgccgatatatgtcgccgggcacagtaccgtggcgcgcaccaccggctcgtagacggtctcgaccttgccctcgggaaactccgagggattggtgaccatgtgctccgatccgtcctccatcaccacgcggtagttcacgctcggggcggtgctgatcaggtcgaggtcgaattcgcgttccaggcgttcctgcaccacttccatgtggagcaggcccaggaagccgacgcggaaaccgaagcccagcgcggccgaggtctccggctcgtaggtgagcgcggcgtcgttgagttgcagcttctccagtgcctcgcgcaattcggggaagtcgtcgccgtcgatcgggtagatgccggcgaagaccatgggcttggggtgcttgtacccggccagggccccggtcgcgggatggttggccgtggtcacggtgtcaccgacccggctctgccgcacgtccttgacgccggtgatgaggtagccgacctctccgacgcccaacgccggggattcgaccggctccggggaatggacgccgacctcgagcacttcgtgcacgctgccggtggacatcatctgcacccgttcacggtcggacagcttcccgtccacgacgcgcacataggtgaccacgccacggtaggtgtcatagacggaatcgaagatgagggcacgcagcggcgccttcggatctccctgcggagtgggcacctgctcgacgatcgcgtccagcagttcggccacgccgtcgccggtcttggcggagacccgcaacacgtcgctagccctgcctccgatgatgccggcgatctcggcggcgaacttgtcgggctgggcgctgggcaggtcgatcttgttgagcaccggaatgatggtcaggtcggcgtccaacgccaagtagaggttggccagggtctgggcctggatcccctgcgcggcatccaccagcagcaccgcaccctcgcaggcttccagggaccgggagacctcgtagctgaaatcgacgtggccgggtgtgtcgatcatgttgagcacatagtcgtggtcgccggcgtgccacggcatgcgcacggcctgggacttgatcgtgatgccgcgctcgcgctcgatatccatcttgtccaggtattgggcgcgcatctcgcggggatccacgaccccggtgagttggagcatgcggtcggccagcgtcgactttccgtggtcgacgtgggcgatgatgctgaagttccggatgatggccgggtcggtggctccgggagtggcggacaaagctgaaggttctccttgatcgagggcgcatggtgaacgcgccgccgcccattgtctcatgcgaatttgccgcacgcggatttgccgctgcccgaagggccccgatggcccgatgcgccccgatgacagatgcgccccgatgacatggggagggccgtggccacagggggcacccttgccccgcccgtgaccacggcccacttctcgcccgtgatgtcaggttccgacggtgatcaggccgtcaggacctccttgcacccatgtgatggcacgtgggtggtcatgcccgtgtggttgtggtcatgcagtggccgtctgcccggcaggcgtggcagcacccccggcggacttgccgggaccacgtaggccgacgaagccgaccagggccagcacgatgccgatcgccaccagggcccagccggcgaagacggcgatggtgccgatcagccagaaggcgtaggaggtgaggagcatgcctcgcagggtctcaccggtgagcagggtgccgcgcagggtcgtgtaggccgtgtacttggtctggtcggacttgttggccgtggccacgtcgccgacgccggcatagttgcactgctcggccggcacggcatcaagggccgttccatcggcggccttgaccgtcttgcaggaggcctgcatgtggttccagatgtagtggtcagcgaaggccctggcctcggtgccagtggtcatctccttgttgaagaagggtttcagggcgtcctgggatgcctgcggcaggttcgtcacctgatctgccgtgggcatgctgatcgcctctttcttgagttgatcagtgacattgttgtgggcgaaaactcccccgaagacggcagcgacgccgaccagggcaagcacgataccgacgattcgcagcaacgtgcgatagacggagcggttcacagtgcaccagcctttgaagtatgggaggaaagtagttgaatcctcattgacctaattcgatggtactccgttttcgtttgggtgagtctgtttttcaccacgggcgtcagcggacgccgtgacctgcgtgcgcggcggtcagcaggagcaccgagatccccgatttttgtcgcagacacggacccggtgatagtctcgatcgctgtgtcctgtgggcacaccacccagtaacgacgaacacgaaggttgggccagtggcaaacatcaagtcacagaagaagcggaacaagaccaacgagaaggcgcgccagcgcaacaaggccgtgaagtccgctctgcgtactcatgtgcgcaacttccgtgaggctgctgcggcgggcgacaaggacaaggccactgacctggccaaggttgccaaccgcgccctcgacaaggccgcctcgaagggtgtcatccacaccaatcaggccgccaaccgcaagtcggccatctccgtcaaggtcgagtcactctgacttttcgccccacggcgtagttcttttccaacgccccgatcccactgggtggtcggggcgttgtcctgcgtccacaaacaggtcatcgcccggaccgggccgacatcggccccgggcatgaaaggctgcccgcatgcgcacgcacccgaccgggtccaccagcggacctgatcccgtcaccgccgacgggggcattgtgagactcggtgccacacccggcgaatatctctcggccttccttccatccttcctggggctgtgcctggcgtggctgttgatcgccgtgggtggcctgtcgcgtcccgtgcgacccgtgaccattgtcgggctcgtgcttgctgccatctgcgtggtcctggcactgctcgaggtccgcgacctcccccgccgcaccattcgctggaaccgcggcgggatcaccctgcaggcacgcaggctgcccacgttggccctgccctggtcggaactgggcgtggttcgcacggtggtgcagcccgaccgactgtggtgggtgttgccccgcacccgcgtgtggctggaatgccaacccctcgaccagcccgccggattcgacacgcggcacccggagctggccgactacgaatcccccgcggccgacgagggctacagcgcggtacgcctgatggtgggcctgggcaaccggagggcacgccgcgttgacatggcactccgcagggcaaatcccacctaccgcggactacggcacctgccgccggcccgcaggtcgcgtccgggggccggcacccgccagcggggtgcacgcttgcacccgtgatcgcgacggcgcatcaacgacgccgcacaccggcactgcgacgatgtcccgacgcatcgtcgcgccgggcatggtccagcgcgaggatcagctgctcaagggcgaatcccgcgtcggttgcggcgcccttcacggcggcatcggcgcgggacagggcgatgagcccccgggccactgccgtctcgctccacagccgggactggcgcgccagtgtcttcaccttccagggggggacgccgacgatgcgcgacatctcgatgtcggacatccgctctgcccgcacgtcgagatagcgccccagggaacgcaggccgttggccagcgcgctggtgacgagcaccggtgccacgcccaggtccagtgcccagcgcaggcgctccagggcctggccggtctggcccgccaggactgcatcgctgactgcgaagctggtgacctcggcacgtccctggaaatagcgtgagatcatctcggaggacaatctctcccccgcccaatcgctggccagctggctgaccgccccggcaagtgcccgcaggtcgttgccgacggcatcgaccagggtctgggccgcgtcggattccatgcccacccgggcggcgcgcgcctccgcctgcacgaacttcggcagttcccacgccttgggggcgaccacttcgaccacaccggccttcgccttgcgcaacttgtcgaccagtccgcggcccttgttccctcccgggtgcaccacgatgacgccgacctccgggctgggggccccggcgaatgcgacgagggcgtcgaccgactcgggtaccatcgactcggcccccgtgatgatcaccaggctgtgatcggcgaacagcgagccaccactcgcctcgacgaagtcggccgggctcatgtcaccacccacgagttcgaccaattgcaggccgggctcctccgccatggcgcgcttgcgcaatgcagccaccgcccgttccgacaacagctgttcggaaccatggaccagggtcaccgacccgaacactggcttgctgctggtttttgcgctcaccccttcatcgtgccatcgagcacccccaacatcgaaccaccgcccgaccggtcgctcaccgctggctgaccacctgcagggatcggtcactgtgacgggccaccgccagcgccccctgctcatcagtgcgcatgatggtcatctgctggcgcatgaggagctccagggttgcggccgcggggtggccgtagccgttcttcttgccgacgctgaccagcgccaccctggccccggtggccgccaggaaatcctcgctctggcgcgccgaaccatggtggggcaccttgacgatgtcggcgcggagcaactgcgggggaacctcccgcagggcgttgcgctggccgtccggctcgaggtcgccggtgaccagcacattgaggtccccgttgcccgcgagcccgaggatgcttgcgtcattctcggccgattccgaacccgcccccggcgacgtcggctgcccggggacatccccggaaccggcctgcagggtccgccagtgcccctcaccgatggcccattcctgccccggtgacgccgtggcgatctccaccccggcgcgctccagctggctgcgcacccgggccgcccccgaggcgggggatgccagtgggctgaccagcgcctgacccacccgcgcggaaccgagcactcccgcggtgccatcgatgtgatcggcatggaaatgcgtgagcaccaggagcggcaccgtgtcgacgccggcagtggtcaggcaggcggccatcgcgtccggctccggtccggtgtccacgacaatcgccgcccgtggcccggtgcggatgagtgtggcatcgccctggcccacatcgcagctgacgacctgccagtcgcgcggccacccgggcaggggcggtcgccacaggcaggcgatcaccatgacgccggccaacgcgaggcaacccagacggcgtccgaccaggcgccccaggatgagcgcgatcatcaggcagaagatgatcaacaaggtgatggagccgggcgacacgggccacgtcatggtggccatcggcgccgatgccgccagatgggcaatgagaatgatcggttggacgcaacacccggcgagccaacccatcacctgcgccagcgggccgagcaccggcgagatcagggccgccacgagccccaggaccgtcacgggaccgacgaagggtgccgcggccatgttggcgcccagccccaccaccgagatctcgccggacaggatcgtgatgaggggctgcgtggccagttgcgcggcggccggaacgcacagcgattcggcgagccatccgggagcccaacgccgcatccttgcctgccagggcccggcccaccacaggatcccggccgtggccgtcgccgacagggcgaagccccagctgcgcgccaaccacgggtcgacgagtacgacaagccagaccgccaccgacaactgtcgcaggcccgcaactccggttccgcgtcgtccggttgcggccaacgccaccaggcccatggctgcggcccggacgacgctggcctcggcccgacagatcaccacgaagaatgccaccaccacgaccccgagtccgcgcagccaccagccgcgtactcccgccgtgcgtgccacggccatgaagaagaccagcatgagcgtcaggttcgtgcccgagacggcggtgagatgggtgaggcttgaggccttgaagtcgtcgaccaggtcggcgggaaggccggcggtgtcacccaccaccagggacggcacgaggccggcctgttcccggctgttccaccccatggcgtcacgcaatccgctccgcatccggttgatggtggagtccatcgggccgggcggggcgatcacctgcggggatgccgacagggcgacgcgggcgcacaatccctgcgaggcctgacgcggctggtcggcacgtccacccaggcgcactgcctggcccacctgcaggccggcgatggcgtcgcccgggtccccatggccgctcagttccacgcgacatcccacgttccacccgacgccggcgatatcgacccggctcacgtcgatgcgcaccacatgggacgcggacccgaatcgggagggcagctcacgtggatcactgcgcacctggccctggatggcgacgacgctgcggtcacgtccggcctgggcaaggggcccctgcgaggcggcctgcagatgtgccgtcgtacaggccagggctgacagcgcgaccaatccgcacgctgcgacccgccaacgccgcatcgccagcaacaccccgaatgccaccacgacgccgaccgccatgatcgtggtcgccatcgcactgtcagcgagcacgatccatgccgtggcccaggcgacgagggctggcgcgaccagccgcaggtcgatcacccgcaggtgggcccggctgggttcgtcgccgtcagggatgcctcgcctcccccgccggtggttcgcccgccggcggatggattgcgccgagcgtccggcagatggattgcggcgctgatcagcccaccgtgacactgtccttcatccgttcataggacttggccccgatgccgtcgacctcccgcagctggtccacccgggtgaacttcccgtgctgggtgcgccaggcgatgatcttctcggcggtgaccggtccgaccccgggcagctgatcgagcgccgcggcgttcgccgtgttgatgttcaccgtccccgggcgcgacccgcccgccccaccaccggccccggcggccgggccggagtcggttccagccccgtcggggttcttcagctcgccacggggtgagcccttcgtgccgatgatgagttggcatccgtcgcacactggtgccgccatgttgagttcgcccgcgtcggcgtccccgcgcagtcccccggcggccgcgatggcgtcggcgacgcgggcctgggccggcagggattgcacggcgggattctgcacggccccggtcacgtggacgcgcagctgcggcgtgggcgtgggggtcaccgacggcgacgatggcgacatcgaccccgccaccggcaccgccgtggcagcggggacccgggtgctgcgtgccttgaggagctgaccgccggcgagcaccatgaagaccacgcagaccacggcgatgaccccgaaatgggcacgcccgaacgaacccagtcgagtgaccatggtggaccagcgtccacctggtgcgggggcgaactcctcgtagggttcacctgtccggcccactgcccggtcggggtccgggtccggttcgaccggtcccccggaggtcccgccccagtcatcgcgccacccggcatcgcggcccaccgtcagctggggcagctcgtcagccaggtcgtgggcctgcggttgtccctcccccgcctcctcggcaccgggaatgggcgggccgatacgctggcccgccatcacctcgcgaaggcgatgggccagtgcttcggaatccgggatccgaccacgtggggagagctgcacgcacccactgtgtgcgcgccgcgggcgatcaacccatcaacccatggctggggacggccaacccgccgggcgacggccctgtggatgggcgcccggcggctcaggggccgatggcggttcagacctcgtcgacgacttccacgcgcgggtaggtgggatgccacatgtgatcggagatggcctgcacgaggtcgtcgggaatcacttccgccaagccctcggtgatggcccgctgcgcgacgtcgaagccgaccttggccgacaccgagcgcaactcactgaccggtggcaacagcgaggcgcccgagtagcggctcagtccggcgcgggcaacggccttcgcagcggccaggatcatgccatccgaaaccttggtggcccgcaccgcgatgacgccgagcccgatgcccgggaagaccagcgcattgttggcctgggcgatcgtatgggtggttccgccgtaggtgacgggatcgaagggcgatccggtggcgatcagggcccgcccgtcggtccacttgagcaggtcagcgggcaaggcctcgatcttcgaggtgggattggacagcggcatgatgatggggcgttcctgctgggcggccatggcccgcacgacgtcctcactgaaggcgcccggctgggcggaggagccaatgagcatggtgggcttcacccgcttgaccacctcggccaggtcgtggcgacgccaaccggccacatccgattcggcgcgggcatagggatgctggaaatcgcgcatcttcatgccctcgacgatcagcccgtggctgccgatcgcccagaagtgcttgcgcgcctcctgctcgtcgatgccgtagtcgaccatcatctgcaccagcaggtcagagattcccactcctgccgtgccagcaccgaagatgacgatgcgttggtcggtcaacgggatctcggagcgacgcacggccgacagggcggcggccgccacgacggcagcggtgccctggatgtcgtcgttgaaggtgcacagctcatcgcgatagcgcgccaggatgcggtgggcattggcggctgcgaaatcctcccagtgcaccatggcatgggggaacagccgatgggcggtccggctgaactggtcgacgaattcgtcatagcgctctccgcgtacccgcgaatggcgcacccccagatagccgtcatcgttgagcaactggaggttgttcgtaccggtgtcgagcacgacgggcatcacgcggttgggatggatcccggcggcagcggtgtacaccgcgagcttgccgacggtgatggacacgccacccactccctggtcgccgatccccaggatgccctcggagtcggtcacgacgatgaggtcgacatcgtccgaggccaggttgtaggcgcgcagcgatttctcgatctcatcggggtggtcgatgtcgatgaacactccgctgggccggtggaaccagttgctgaattcctcgatggcccgcccgatggtcggcgtatagatgatcggcagcatctcttcgatgtgctcggacaccagcctgtagaacagcacctcgttgcggtccttgagcgctgtcaggaagacatagcgggccatcggattcggctctgtcttgtactggcggtagatgcgcttcacctggtcgtagacgttggtgacgccggggggcagcaacccgatcaggccgagttcctcacgctccgaacgggtgaacgccgtgccgaagttgatcatcggatgggcaagcacctcacggccacgcgcggcgatgcgcacgacctcctcgccatcttcgcggacatattcgaaatcctgagacacgcagtccccttccggcgtcattgccatgccatgcgatggttggggcatcaacatggcgccctgactacccattatgccaagctgaaatgtctccccgggtcataggtcgcccgaccccgcagcagggtggccgcgacactggtgcggtagttgcgttccttgaacggcgtgttgtgggcgatggacgccagtcgcgccggatcaacccgccacgggtggtcggggtcgaccaggcagatgttggcgaatcggccgacctccaggtgcccgccgtgttcggcctcgatgcccagcaaccgggcgggggcctgactcatgcggtcggacagctggcgccaggtcatcctcccgctctgcacgaacaggtcggccaccacggccagggcggtttccagccccagcatgccgttggcggcctgatcccaaccgcaggccttggcggcgtcgggatggggggcatggtcggtgccgaccatatcgagcgtgccgtccaggaaggcgtcccgcacggcctggacatccgcgggcccacgcagcggggggttcaccttgaagtcgggatcctggctggccacctcgtcggtggtgagcgccagatggtggggtgtcgcctcggcggtgatgtcgatgtcctggtgcttggcccagcgcaccacctcgacgccggcggcagtcgacacatggcagacgtggagcctggcccccaggtagccggccatgagcgcatcgcgcgcgatgatcaccgactcggccatgcccggccagcccggcttgcccagctcagctgccagggggccgtcatcaagttgtgcgccgaccgtcagcaacgggtcctgggcgtgctgggcgacgaacccgcccagccggctggtgcgttccagcgcgccacgcatcaggtccgaccgcgacacgcagtgcccgtcgtcactgaacatgcgcactgctgccccgctggcggccatcccctcgaggtcggcgagctcctgtcccgcctgtcccgtggtgaccgctccgatggggtagaggtcgcagatgccaacctgccgtgccgtatcgagctcgtattcgaccacttcggcggagtcggccaccggatcggtgttgggcatggcgaatacggccccgtagccaccccgcaccgccgcctgcagtccggtggcgatggtctcggcgtttccctgaccgggatcacgcaggtgcgtgtgggggtcgaccagcgccggcagggcaatgaggcccgagcaatccaccgtcggcacctgcgaggatgcttcggccggatcggccagccgctcgccgcgcacgaacaggtcgccaaggccctcgccgagcaggtcaacgttgtggagcagcagctcactcactggttcttcctccatccacccgggcacgccatggggcgccgacgcgcccggacgcgctacttgccgggaaccagactcaccatacggggcagtttcgtgatcgtcttgaccaccggacgtccgttcagcgcgcgctgcacattggagtcggccatggcggcctcaatggcctgctgctcggtgatctggggcgacacggacagcttggcacgcaccttgccctgcacctgcaccaccatcgtgacctcctcggccgcgagcagtgccggatcggcggtgggccagctgctgtcggcgatcgacggggcatgtcccagcacctcccacatctcctcggagacatagggggcgaacaggctcagcgcctgggcgatgaactcgacggcctccctgaccgccggatcgtcgctcccggcattcgagttgggggcattgtgcccgtcaacggtcttgcgggtggcattcaccagttccatgatgcgggcgatggccacattgaaccggccggcggccagcaggtcggtgatctccgagatcgccttgtgggtcgcgcgacgcagggggcggtcgccactggccggatcggcgccgagcggcgaggtgacctcgccggcgagccggtgggcacgctgcaggaaccgcagtgagctcttgggcgacagatcggcccagtcgatgtcctcgtcgggcggaccggcgaagacgaccgtcaggcgcaccgcatcgaccccgtacttgtcgagctgctcacccaggttgacgccattgccgagcgacttgctcatggccttgccctggttgatcacctggccctggttgagcagccgggtgaagggttcgacgaagtcgatcatgcccaggtccttcagcaccttggtgaagaagcgggcatagagcaggtgcatggtggcgtgctccgcgccgccgatgtactggtccacgggagcccaacgagccacgtcctcggcgcggaaggggccctggtcatcatggggcgagcaatagcggaagaaataccacgacgagtcgacgaaggtgtccatggtgtcggtgtcccgctcggcgggcttgccacacaccgggcaggtgacggacttccactgcgtggcggcggccagtggggagatgcccttgggagccagtgcctcaccgcgcaggtccggcagcttcaccggcagctggtcgtccggtaccggcacgtcaccgcagttggggcagtggatgatcggaatcgggcagccccagaagcgctggcgcgacagcagccagtcgcgcaggcggtaggtgaccgtctgctcccccgtgccctgcgcctgcaactgctcgacaatggtcttcttgccggattccttgtccttcagcccgtcgaggggcccggagttcatataggcaccatcgccggcggtggccacgccggtctgtgccggatcgccctcgccggtgtcaatcacctgacgcaccggcagcccgtacttcagggcgaagtcgaggtcgcgctggtcatgtgccggcactgccatgaccgcgccggagccgtactccgacagcacatagtccgcggcccacaccgggatcttctcgccgttgaccgggttggtggcctccacgcccagcgggaccccggtcttcacgtgctcagttgactggcgttcgatctcggtggagtggttggtcttctcgcgatacgcctcaaaggccgcccggtgctcgtcggtgaccacctcatcggccagcgccgcatcgggtgccacgaccatgaaggtggcgccgtagagcgtgtcgggtcgggtggtgaacacggtgacgggctcatcgcggccgtcgatgtggaacttcacccaggcgccctcggagcgtccgatccaattgcgctgcatcgccagcacgcgctcgggccacttgccctcgagctgggccatgtcgtccagcaggcgctgtgcgtattcggtgatgcggaagtaccactgcttgagctcgcgcttggtcaccagggtgccgcaacgctcgcagcggccctccttgacctgctcgttggccagcacggtctggtccttggggcaccagttgacgtagccgtccttctggtaggcgagtcccttcttgaagaactggatgaacagccactgcgtccagtggtagtactcctcgtcgctggtgtgcagctcgcgactccagtcaaggctcagcccatagcgctggaaggacttcttctgggtcgcgatgttctcgtaggtccagcgcgcgggatgctcgttgttcttgatggcggcattctccgcgggcagcccgaaggagtcccagccgatcgggtgcatcacattgaagccctgcatgcgccagctgcgggcgagcacatcacccattgcgtaggcctcggcgtgacccatgtgcaggtcgcccgagggataggggaacatgtccagcacatagcgccgctggcgcttgtcatccggcgcgtcggaggccttgaaggtctcgtgctcagcccagtacttctgccacttggcctcggccgcgggagcgtcatatccggaacgctcttcagaaacggttgcggcgtcgtgcttcggctcgccctggctcacttgctgtgcctcctgtgctgctgctgttcagcgatcaagcagttcccgacacacaaaaccccgatgcctcgtcagggcaatgccctcaggcagcaccggggaagcccgcggcgccggctccgcccgtgacccccgggggccgtggtgcacaggtcttcatcacctgcgtgccgggcggaatcggcagcgtggtcggccgggaaaacggctcaatcacatgtggcccccagcttataggacacccgtcgaacccccctgcgcgacgatggcgacggacgcggtggcggcgcatgcccggcggcgggacggtgagcgctcatgaggcctgcggatcagcgatcaccggaggggctggttggcgcagccggcggtgtcggtcgcgccgatcgcgccccatgcgcttccacatgctgggaggtacggcgaggtcatgcacctcccgcagcaccgccagcatcgaatagtccggatcgacctgttcgcagcgcaccaggcattcggtgaagacggcaccgcccccacccagccaggccgccactgcggtcaggcacagcaccggcgccgcggcggacggtggggtgagtgccaccaccgccaaccagagctgttgatggcgccaggcccccacgctgtccatggccagccatgcacggtcacgcagctccaggcactgcaccagggcacccaactgcgtcagttcgtcgcgcgacaggtcctcggcgtggtcgacgcttcgtgtcaggcaatcgtccaggaattcctcccgttgacccggcgaccaggccgaggcctgctggcgggcggtccgccacgcgtcggcgatcgcgcgatcatcggctccgggccccgccaccagggcggatacctggtcgcggccgcccaggacctgcaggcccgcgctgaccgctgcggtcgccgccaccgaggcgcgtggatcgaagcgatggcccggcgaccactcgacccgttccccggcgctgcgcacccaaaagcgtcgatcgctcaccaccagggaaatgtcgatctgctgggcgcccagggcgatctcgacgcaggccacggcctcgtcggtgctgcgcgcaggtccgtagccgacgaccatgagcatggcgtcgccgacccgggtgctcagcatgtcggccaggtcggcgagtacatcggcctgtcccacctggtcggtggtgagcgcgcagccgagttcgacgcgtccgtggcgctgggcgaggatcaccacgttgtcatgcgggtggtagcccaaccagtagggaatcagcgcgaccagctcgtcgggcgtggtgatgtgcaggtgaacttcatgatcattcatgcctgctgtatgtgccgcgcgaccatcgccgggcagcgtctcggccatctgtggatgatccgatgcgcaccgcccacagatcccgtgtggtctggcatcccgtgtggtctgcatcccgtgtcgcctgacatcggggaccggggtgtgtgccggcatccggggaccggcccggccgcaggcgtcccccggcacgctggcatagtctgaggccaccatgagcgaacctccgacacacgatccccgcggcgaccacgagcaggacaccggaccggacgcgccgcccgtgcagggcccgccccagggcattgatccctacggagatcagcccgatgtgcccgacatggccactcccccgtccccgtggcaggcaccaccacccgccgcgacgccgccttcccgcacggataccccggccccggagaccccgcccccggccatcaaccgcttccaggtgcgctcggcacgcggcccggtggtcctggtggtcgtggtcgcactcatcatcgtggcggtgttggtgaccctcgcggtgcgctcacccaagcagggcgcgcaggcggcatctccctcgccctccgcagcgtccagcgcccggcctgcgaccagtccggcgacgccgccgaccgcgctgccggactccaacaccatcccggtggactacgaaggcttcaagggccagtggaccatcacgaagtcaacctgggattccaccggcctgaacctcgaggtggaggtcaagggcaccagcgggtccctgggcttcagcttcttcgccctcgacaccgatggcggatcgaaccagtacaaggcctccggtgcgttggccaccggaacggtgacggccggcggaacgaccaccgggcgggtgcacttcaacaaatcgcaccagaccaccctggtgatcctggccaactcatacggccgtcagatcaccgcgttgaccgtggatgcatgagccgcgggggcacctggtggacgccccggtttggcaagccgtgcgtctcgcggtaatctatccgggtcgctgcgaagcagaagggcagcggcccaacagtttggggctatggcgcagttggtagcgcgcttccatggcatggaagaggtcaggggttcgaatccccttagctccacaagtaggacgcagtgctcaggcccccgcttcgtgcgggggtcttttgccgtccccatgttttttcgcccccacgtcctgccgtcccccacgtcttattgtcccgcgcggcagggagggttccaccatcagccctccaccagttgctggatgccctgccgatagctcgtcacggggaagtccgggaaccgtgacatgaacttcgatgagtcgaagatgttgtcctgtcggtagcgcggcagcaactcctccacctcgcggacggtcggattgagcaatcccccgatgcggaacgccaacgtcggcaccgtggtgtagccgatcctgcgccccaccgccgccgaggcgaccgcgatcattccgcgataggtcaaccgatccggatcacagggcaggtgccaggtctgcgcataggcgtcgggtgtgttgccgagcagtgccatggccctgctggcgtccggggtccagatcagggtgcggcgggtgtgcgcgctcacgggaaccatgggccgcctgcccttcgcgatccgcccgaagaccatcgaattggtgaggctctgcgtgcggccggggccatagaactccggggcgcgacagatgagggcctcgaggttgccggcgcccatctggtcaagcagcatcgtcgtgatgtgggcccgcacgcgggccttgggccccaccggctcgaagggtgtctgttcggtctggggagccgcggtacgggggtacatacaggtgttgtcgaagaacaccaaccggcaatgatgttgccgacaggcggcgatgacatttcccatcatcacgggaaactgctcctgccacatcgcagaatccatcggcagtccgacggtgaggtagacgacgtcgctgccggccacggcgtccgcggtggcccgggtgtcccgcaggtcggcggacacgagctcgtcggtctcgtgcacggcgcggggatggcgactgaccagccggatgtcgtgggtgacattgcggtgaagctcacgggtgagttcttcggcgatctggccattggcgcccagcgctgtctgcatgcgtccatcctgcccggccgcgccaagccacggggtccacgacggccgtcccgttcccccggggacgggcaggcccgtcgcgtccagtgaccggccaacggcccggttcggcggattaccggggcagcgtgatcccctgccgttcggccagctccgccagcttctcggccgagtcggtctcgatgcacacataggcgcggagtccgtcatcgtcggcgcgcagcaggtagtagctcaccgcgtcggtcagcagctcaccggtcgcatcgaggaacaaccaccgcacatgcaccagcaccaccgtggccgacagctgctggtggtcgagcagctcaaagccgaccgagtccagaccgagctgctggtagagcgggtaggactgctccaggcccctgaccatcgcctcgcgcgactcgagcatgccggcgaaccggtcgtcgaggatcattccgggggttccccacagcccggcggcccgccgcgcatcgaacgcggccagcgacgccgcgtagcgggtcaggtagtcgtggatctcggcccgggaatcggtcatggccccagactaggtgtccgatgtcgggtcgggcccgggacgtgcgccccacctggtcgtcaggacgcgctgacattccaatcgacgatgtgccagcgtccctggccgggttccaggatcgaccaggcacagttggccatggtgcccaggtcctgggcgccctgatagtcgatgttgcacagccttgccgcacccatgcgcatggccacgccatggctcaccaccgccacggtctggcccggatgggccgcggcgatctcgcgcagcgcgggcgccacccgttcgcccacctcgcagcgcgtctcgcccgtgggcgaatagcggaagtcctgtccggtggcccggaaccgggcgatctcgtcctgggcgaagacctcggccgcccgcagccccgaccactgccccacgttgatctcctgcaggcgatcatcggtggtgacggccagcccggtcagttcggccagggtgtcggcggtctccagcgcccgacgcaacggggagctgacgatcgcctccggccccagggccgccacatggcctgcggccgcctctgcctgcgacaggcccgcgacattgagcggcatgtcggtctggccctggaaacggccggcaaggttccagtccgtctggccatggcgccacagcaccagtcgggtgggcgcgctcatcagttctgctcccgggccgtcggagtctcctgcggcagcgggatctccggacaatcgcgccacaaccgctccagggcgtagttggcgcggtcatcggtgcggaagacgtgtaccaccagatcgccgtaatcgagcagcacccaatggttgccgccctgcccctcgcgacgcagcaccttctcgccacggtcgatcagggcgtcctggatggcgtcgacgatggcaccgacctgccgctcattgtggcccgagacgatgaggaacacgtcggcgatggccaactgctcgctcacgtcgaaggccaccaggtcctcccccagcttgcccagcgcggcctcggcggcgacgcgcgtcatctcgacggcatgttcagtggcgctcaagagttgctcccatccgagcccggttcgtcggtgcccgttgtgtatccgcgctcgtccaccggttcatcaagcaccagcacatccccgtcgttggcgtcgtacagtccccgcttggccacatactgcaccacgccatcgggcaccaggtaccacagcggaagtccctcggcgacgcggttgcggcactcggttgacgagatcgccagggccggcacctcgaggaaggtgaccttgtcggagggcaggtgggagaagtcgcgttgtccgaggttgaccccgggacgcgtcacgcccacgaaatgggccaggtcgaacagctcgctggcaccgcgccacgtgaggatcgaggccagggcatcggcaccggtgatgaagtacaggtcgaggttgccgccgcgctcgcgtcggatgtccttgagtgtgtccacggtgtacgtattgcccttgcggtcaatatccacccggctgaccgtgaaccgtggattcgacgccgtggcgaccaccgtcatcagatagcggtcctcgcccttgctgacgcgacgccccgccttctgccagggcacgcccgtgggcacgaagacgacctcgtcgaggtcgaagcgcgccgcgacctcgctggcggccaccaggtgaccatggtggatcggatcaaaggtgccgcccatgacgccgaggcgatatcgccgccaggtgttggcgcgcacgaggcccaggttgaggcctgcctcctcgtcatccgatgcggattctgaacgtccctgggtcatcgttgtcccccgacgatcgtggctgacatgggccatagcctaccgtcgcgacccgtcatcgcgggaaagcacctcagtggcgggtctggccctggccggtcagcacgtacttcgtggtcgtcatctcctgcaaccccatggggccgcgcgcatgcagtttctgcgtggagatgccgatctcggcgccgaagccgaattcgccgccgtccacgaagcggctggaggcattcaccagcacgcaggccgcatccacctcggtggtgaaccggtgctgggcgatgccgtcatcggtgatgatcatctccgagtggcccgtggaataggtgcggatgtgctccagggcgctgtcgaggtcgtcgaccaccttgcaggcgaggtcaagtgagaggtactccgcctcgtactcgtgctcgccggcgggcacgatgcgcggatcgatggccaccgagtcggcgtcaccgtgcaccgtgaccccgacaccgcccagcgcctcgacgacgaccggcaggaactccgcggcgatgtcgcgatgtaccagcatggtctcgagcgcattgcacacggtgggacgctgtaccttcgcgttgagcaccaccccgaccgccatctgctggtcggcagcgcggtccacgaagacatgcacattcccggtgccggtttcgatcacgggcaccgtggatccctccacgacagtgcggatcagcccggcgccgccgcgcgggatgagcaggtcgatgctgccgcgggcgcgcatcatctggccggtggtctcatggccaccttccacgaggttgatggcgtcggcgggaaggtcggctcgcaccagcccctcacgcagcgcggtgacgatcgcacggttcgactccagggcgctcgaggagccgcgcagcagggacgcgttgccggacttcaggcagatgccggccgcgtcggcggtgacattggggcgcgcctcgtagatgatgccgatcacgccgaagggcacgcgcagctggtcgacgtgcacgccgttggcgaggttccacccacggacgacctggcccaccggatcggccagcccggcgaggtcgcgcaggccctgggccatgccggagacgcgttgcgggttgagcgacaggcgatcgatcatcgcgtcgggcgtgccggcggcgacggctgcctccacatcacgtgcgttggcactcagcaactggtcactggactgttcgagcgcagcggccatggccctcagtccggcgtccttgcgctcacgcgtcagcgtggcaagtgttctcgacgcggtgcgggcacggctggcgatttcgtagacctccaccactcaagcctacaggggcccccatggcgccaggccgtggcccatctgtcgttcagccggcgggcacggcgggcttgtggccggcaacccccggcagctggacgccggcccgcttgaccatgtacaggccaaggcacagcatctgcaggatgaaggtggccgaggccccgatctggattgcctgctcatggttcccgaaggcgtagatgagccacaggatctgggtgaagccggcgaaggcgttgtagaaccacgagtagccccggaagtcgggggccacccacagcgcctggaactggatcatcatcgagaccgtcatcgggacgatgatgagcatgccgtaggccaccgccccgaacaccgaatcgaccgtgacgagcgcaccggcgaccagcaccgacaacacccacacattccacgacagcttgcggtcgcggcagatcacgatgaggatgatcgccgcgcagcacaggacgacgatgttgcacgcccatacattgggctgcccggtcaggaagccatgcacggtccagccggtggaggcacccacctggagctgccaggtcagcggcgacaggccggcactcgaccccacccggatcacgtgcacggtctgcggcaggacatagaacgcccctatgatcgccgccaggtagccgacgaccagtgtccactccatcaggggttccccattccctcgatatcgttggctcagacccccgggtggttcatcagcaccagcatgtcgcggtgcaccacggctcggtcgaagccctcacccatctccacaccgagatcgacagaattcttgcccaacatggacggcaactcgtcgcttgaatagttgaccagtccgcgggcaacgatatcgccctcgggaccctcgacctcaaccggatcgccggccacgaaatgtccacgcacgtcggtaacacctgccgccagcagcgatgccttgcggttggtcagcgcgcgcaccgcgccggcgtccaacttgaggcagcccttcacccgtgaggcataggccagccacagcagacggcgcggtcgggcatggtccacgggggcgaaggcggtgcccaccggggcgccgtgcagggcgtcgaggacggcgttggcccgcgccagcatcaccgggatgcccgccgaggccgccagctgggcggcctgcaccttggtgttcatgccgcccgttcccaccgcagagccgatgcggtgggtgtccacgcgcagttcgtcgacgtccggcacgaaggagatggcctgtgcgcccggatcgtcgggatgggaggtgtacagggcgtccacatcggacaggatcaccagggcgtcggcccggaccagttgcgccaccagggcggccaaccggtcgttgtcgccgaagcggatctcctgggtggccacggtgtcgttctcgttgaccacgggcagcacgcccatgcgcaacagggtgcccagggcgcgcagggcgttgtggtaattgtcgcgtaccgccacatcgtcgggcgtcagcagcacctggcccacacggatgtcgcgatgggcgaacatctcggtgtatcgctcaatgagcaggccctggcccactgcggcggcggcctgctggtgggcgacgtcgcggggacgccgggtgagccccaatggcttcagtccggccgcgatcgcccccgagctgatgagcacgatgtcgcgtcccgcgtcgtgcacatcggccagtgcggccaccagtgctgccaaccgggcatcgtcgagtccacgccgggcactcgacagcgacgaggagccgatcttgaccacgatgcgccgtgcggatccgatcgccgcgcgcacgctctcctccgtgtcgagggcgggaacaaccgagggaacctggtcagtcatcatcgccctcggtataggactccaggtcctcgttcgggtcgtgaccgacccagttgacctcgaccccctcgccgtcatcgccctcgccggcacgcagcttgtcgagttccgcggcgtggatgcggcgccagtcggcgtcgcggtcgtcgcccatgagctcggagcgggctgcctggtattcggcgtcgcgtgcccggcgacgctgggtggccgggcgcagctcattgagccgctggtcctcgccacgacgcgacaggatctcggccccgatctcgcgttgcgggatgaagtcgaagaccaccggatgagcgcccgcgccaatggccaccgcgtcgtgcggctcggcaccgatcttgagcagttcgtcctccacgcccagccggttgagccggtcggcgaggtagccaaccgcctcgtcattggcgaagtccgtctggttgacccacagctcgggcttttcgccccgcacgcgccagacgaagccgccctcgccgtcgcccatcttcttgatggtgaagacgggtttcttgtccaccgggcggggacggatgacgatgcgctcggcagagggcgcgggatgctccttgcggcgctcctccaccagatgtgccatcgcccacacgagttgcttcatgccctcgccggtcttggcggaggtctcgaacacccgcaggccgcgcgcctccagctcgggcagcaccatgtcggcgatcaccttgccgtcgggcacgtccaccttgttgagcacgatgaggcgggggcggtcgtccaggccgccgtgggcgtgcagctcggcctcgatggcatcgaggtcgcgcaccggatcacggccgggctcataggtggccgtatcgatcacgtgcacgatggcctggcaccgctcgatgtggcgcaggaagtcgaagccgagccccttgccctgggacgcgcccgggatgagtcccggcacgtctgccaccgtgtaggtgatgtcgccggccttcacgacaccgaggttgggcaccagggtggtgaacgggtagtcggcgatcttgggcttcgccgcgctgatggcggcgatgatgctggactttccggccgaggggaagcccaccaggccgatgtcggcgatcaccttcagttccagctggatgttgcgggcgtcgccctcctcgcccagcagggcgaagccgggggccttgcgggccttcgaggccaacgcctcgttgcccaggccgccgcgtccgccacgcgccacgacgtactcggtctcgtcgccggtgaggtcggccagcacctcgccggtgtccaggtcactgaccacggtgccctcgggcacgggcagcaccacatcggcgccgttggcacccgagcggtgctttccctggccgggctggccgttggtggcggagcgctgcgactggtggtggtagtcgaccagcgtcgacagctgggggtcgatgcgaaggatcaccgatcccccgcggccgccattgccgccgtcgggaccgccgagcggcttgaacttctcgcggagcaccgaggcgcagccgttgccccctttacccgcatgcacctcgagggagacgcggtcgacaaaagacgggatagccatgtatcagctttcggtggttgggcggattgctccagtgtagttggcgccccgccatgcgacgtccttcgccgggcgaggcccctcggcggacgcgctcagggccggccccgaaggaccggccctgagcaggatgcatgtgggtgtgagatcaggcggtggtctccaccggctgaatgttcacgacgcgacgaccgcggtgggtgccgaactgcacggctccgcccacgagagcgaagagcgtgtcgtccttgccacgaccaatgccctcaccgggatggaagtgggtgccgcgctggcggacgatgatctcgccggcgttgacgacctggccgccgaagcgcttcacgccgaggcgctgggcgttcgagtcgcgaccgttacgagagctggaaccagccttcttgtgtgccatgtctgtttactcctcaggccttgattccggtgaccttgatacgggtgtattgctgacgatgcccctggcggcgcttgtagcccgtcttgttcttgtagtgcatgatgtggatcttcggacccttggtctggccgagcacctctgcggtgacatcgaccttgtcgagacccgccttgtcggaggtgacgtccttgccgtcaaccaccagaacgggctcaagcttgacactggcaccgacctcatcgaccatcttgtcgacctcgaggacgtcacccacggcaaccttgtgctgacggccgccactgcgcacgatcgcgtacacgctgacccacttcctgtatcgcgccgcagcttgcggcattacgtctgtcccgaccgactctcatcggccaattccacccgaatgccctgtttgcccggccttcaggtccttgcccggcgcccgatccctgggatcggtgccgtccaactcatacccgggcggcgcattcacagagcaccgagggactagattactcgcccccgatatgcccggtcaaaccgccgcccgggaagtactacttgcccgagcgcccaccgcgtcggccaccacgacggtggcgttccccaccatcggcgggtgcctgactggcgaccggctcgtcgtggcgcacatagccgcgtcccccacaggtctcacattcctcggtgaaggcctccgccaggccggtgccgatccgcttgcgcgtcatctgcaccaggcccaggctggtcacctcactgacctggtggcgggtgcggtcacgcccgaggcattcgaccagccgacgcagcagcaactcgcggttcgcgggcagcaccatgtcgatgaagtcgaccacgatcatgcctccgaggtcgcgcagcctcatctggcgcacgatctcatcggcggcctcgaggttgttcttggtcaccgtctcctcgaggttgccgcccgccccggtgaacttgccggtgttgacgtcaatcacggtcattgcctcggtgcggtcgatcaccagggagccgccggagggcaggaagaccttgcgttccagggccttggagatctgctcgtcgatgcggtacttggtgaacagatcgcccttcgtggtgtcccagtgctccagccggtcggccaggttcggggccacgtgttcgacatattcatgcacggtctcgaaggcatcctccgggccgccgtcgccctcgacgatgagttcattgaagtcctcggtgaacagatcgcgcacgatgcgcagcgtcaggtcgggctccacgtacagctgctggggcgaatggccctcggcgaccttcttctcgatgacatcccagtgggccttgaggcgatccacatcctggcgcagcgcctcctcggtcacgccctcggcggcggtgcgcacgatcaccgacgacgaatcgtcgatggcgtcattgacgatgttcttcaggcgatggcgctcggtgtcagacagctttcggctgatgcccgacaggtgcccatcgggcgagtacacgacatagcggcccggcagggagatgtgtccggtgagccgggcacccttggcgccgatcgggtccttgctggcctgcacgagcacggtctggccgggcttgagcgcatcctcgatgcgccgtgagcccttgtggcccttctccatcgagtcccagttgacctcgccggcgtacagcacggcattgcggccacgaccgatgtcgatgaaggcggcctccatgctgggcagcacattctgtaccttgcccaggtagatgttgccgatcagcgacgcggacgccttgcgatcgacgtagtgctccaccaacaggccgtcctcgaggacagcgagctgggtgtagtcctcgcgctggcgaatgatcatcttgcgatcaaccgactcgcgacgggccaggaactccgcctcgctcaggatgggggcgcggcgacggccggcggcccgtccctccttgcggcgttggcgcttggcctccagtcgcgtggagccctcgatgccggtgacctcgtcggatccgtggtgtcgcggctcgcgcacgcgcaccggcagttcggcggagtcggcatcggagccgttgcggcggcgacgacggcgacggcggtgctgggtgccgttggagtcggtgtccgaaccgtggtccgaaccatgatcggcatcggcctcgtggcccgaacccgactcaccattcgagtcctcgccgttgtcctccgagtcgttggagtcctcggaactgcgacggcggcgacgtcccccgcgacgacgacggcgacggtgcgaaccgtgctcgccctcgtcctcggagctgtcctcgccattgccctcggcgtcggacggcgaaccctggtgctcctcgtcgtgctggtcgtcctcggcgtggtcggcttcggccttggccggctcggcacgcctgccacggcgcttgggacgctgttcctgggtggcttcctgctcgtgggcatcgtcgtgatgctcgtcattgtcctgctcgccgtgggcgattgcctcggtcagcgagtcgagggccgccttcttgtcggaggcaccgtcctcgtcctgggcggcggtggccttgccgcggcggttgcgcggcgctgctttgtgggccttggccagtgcggcgtccaggcgttcgtcggtggacgcgccctgctcgccgctctcggacgttgcggccggcgcgggctggccctgcttggccgtggcgcgacgacgccgggtggtcttcggcttctcgtcggcggtggcctgatcggttgtcgtctccgtgacggttgcctggtcggcggacgcagctgccttcaccggctcggccgggcccgccttgcgggatgcccgtgtgcgggtggtccgggccggcttctcgcgctgggccatcacggcggtgatggcggcgacgaccgggtcgtctgatccaccctcgtggccctcggcggcggggcttgtcgtggattcggcctcaggtgccttggccgcggtcctggtggtgcggctgcggcggctgggggccttcttggcggccggagcggtggcctcgccctgctcggcggtggccgtggtgtcaggctgcttcgcggcgggctgggtgtccggggtggtggcgggcgcttcggccttcttgcgggtcgtggctcgccgggtggtcttcggcttggtcgtcgcctcatcggcagttgacgtggccggggagttcgtgggtggttgggttgctggtggctgggtcaccggtgcgggcggcccggcgggacgggtcttcgatcgcctgcccgcagggggtcgaagaagctgttcttcggcgccggtcggttccttgctggggttttcctcgagcatgcagtgctcctcttgcgccctcgcgggcacggatcaatcacacctggggtgtgacaaaagctggcggattccgcagtcgcccgacagtcccccgcggtcgatcactcgtcgcggtgaggatttcaaggttctgcgagttcaagcatctggacgacgctcttacctgagcccaattatgtcacagaacgcataacgcccagcgcgacccacgcgggagcagcgaaaatcgcagccttgaagaccacgccgatcgtcacggctgatcggtcggggactcgtcctgcggggcccgggacggcgcggcgacgagcaggggatcgatgatcgaaccatcatcacccaagggcccctgccgaagcctggcgaacaggcccgggtggtcgtcgcccagccccggaacaagctggcgcaggccggtgaccaggtcgtcgggacgcaccaggggcacgccatggcgcaaccgcacccagatgtggtcaccctcgacgtgggcggccagcacggcagggcgcacatcgaagacccgcaggcccttcttggtgcgccgcgacacctccaggccgggggcggccagcagggcctcgacggccgcgcgcagggcgtccgcatcgaccgcgcccaggtcgatcgtccattcggaggcctgcagcagctcggtgaggctcggcttgctcgactcgatcacctgctcaatgcggaagccggccggcagggccccattgagtttgtcggcgagctgatccgcgtccacctgctcgaccagcgcgatgtccaggtattcggcgtgggactccgcggaggtgggtgccgcgttggcatagctgatgcgggggtggggggagaaacccgaggaataggccatgggcacctcggcccggcgcagggcacgttcaaaggcccgactgaaatcgcgatgcgaggcgaacctggcgacgccgagcttggaatagcgcaaccgcaggcgttgcaccggcggtggctgacggggtggttcgcgttttggcacgcccaagatcctaggacagccggtgctgccagatcccgcgccgcagcgggtggggtccgacgctcagcccgggtcgccctgcgcggagcgctccagccccgcgagcaaccgggacaggaggcgatcgagcatctcgcgctcctggggcgaccaatcccccatggcccggccaaaggcgctgcgcccggcggcgcgaagcacctgggcgatgcgctcacccatggcgctcagccccaccatgatcacccggtgatcgcgctgggacggctcccgcaccaggtagccgcgcttctccaggtgctgggtctgggcggtcatcgtggagcggtcgaccccctgccactgggccagctcggtcatcgccatgggtcccacctcggacaggtgggtcaacaaccaggtgtcggtcggcgagagttcgtcggcaaggctgccgtggatacgccgacgcaccgaggagcgcgacatgacccgcgccaactcgagcatggtgtcctcgacaccggaccctgttgccatgcactgcctctccgtgactcatccgccgtgggtggttcgcctgccgtgggcccaccgtgcgccgcgggacggccccgccaggggccaccacgagccgcccgggaggcgccgcgaaaagccgttgggacgggccatcccgcttgtgcccacatccaattggtttgtattatcaaatcaaatcgccggcttgtccactcaccggaaaggaacctgtatggtcccagcggccgtctggatcgcaaccatcatcctgatcgtcggcttgctggcgttcgactacttcgcccacgtgcgcaaggcgcactccccctcgctgcgcgaggccgccgtctggtcggcggtgtacatcggcatcgcgattgccttcggcatcgtcgtgatgatcgtcggtggcaccgagatgggcagtgaatacttcgcgggctacatcaccgagaaggcgctcagcgttgacaacctgttcgtcttcctgctgatcatctccagcttcgcagtcccccggaaggaccagcagaaggtgctgctggtgggcatcgtcttctcgatcatcgcccgcaccggattcatcttcctgggcgcggcactgatcaaccgcttctcgtgggtcttctacctgttcggcctgatcctgctgatcaccgccgggcacaccgtcaagcccgacaatgaggagtcacacggctccgaggccgacaacctcatgatccggctggcccgcaagctgctgcgcacatcagaccagtacgacgatgacaagctgttcacggtggtggacggcaagcgcatgatgacgccgatgctgctggtgatggtcgccatcggcggtaccgacatcctgttcgcactcgactcgatccccgccatcttcggactcacccagagcacctacatcgtgttcaccgccacgaccttctcgctgatgggcctgcgtcagctgttcttcctcatcgacggactgctggaccgcctcatctacctgtcgtacgggttgggtgccatcctgagcttcatcggcatcaagctgatcctgcacgccctgcacgagaacaccgtgcccttcatcaacgacggcgaatcggtgccggtgatcgagatcaccaccggcatctcgctgagcgtgatcatcggcgtgctggtgatcacggtcgtcacctcgctgctgagcggcgcgggcaaggcccaggccgccggcgcgcggctgcgcaccgagaccgaccgctacctcaaacttgacgaggacaccgaagcggacaagcgtgagcaccgttatcgcgtgctggtccgcgctgccgaacaggtggaggacgtccccccgaagcatcgggaccacatcggtgacgaaaccgaattgaaggccggggtggcccgcgccatgcacgtgcatggccggtggcgccaggagcacgggatgcgtccgatggacgcgccggcctccgacgaccaggaaggcacgacggagggccgcgcgtgagcaaagtgatcaagcacaaatggctgcactggacccgggtgctgccgatcctcgccttcgccgccctgatcgtctcgtggatctaccaccccaccgcagccctcgtgctggcggtgctgacgatcctgttgatcggctcgatcatcgcctcggtgcaccacgccgaggtgatcgcccagaaggtcggtgagcccttcggctcgctggtcctggccgtcgcggtcacggtgatcgaagtggggctcatcctcaccctgatggcctccggcaagggctcggccacgctggcccgtgacaccgtcttcgccgcggtgatgatcaccatcaacggcatcatgggcctgtcgctcaccgtgagcgccgcccgacattccacatcgcgcttcagcgccctgggcagtggcggtgccctggccacggtgacggcgctggccggtatctgcctggtgctcccccgcttcaccgtgagcgacccgagcccctcgtacacgccctcacagctcgccttcgccggcgtggcctcgctggtgttgtacggcttgttcatcgccgcccagaccggacggcaccgcagttcgttcctgccgatcgacgaggacgggatgccgatcgacaccgacgatgactcctggacgccgaccaccgcagccactctgcgcagcctcggtttcctgctgatcgccctggtggccgtggtcggactggcgaagatcctgtcccccaccatcgaggccggtgtggccgccgccggactaccgccgggcttcgtcggcgtgatcatcgccctggtggtgctggcacccgagtcgctggccgccgtccgcgcggcgcgacagaaccgggtgcaggtgagcctcaacctggcgctgggatcggccatggccagcatcggcctgacgatcccgacccttgccgtggccatgatctggttccccggcgagttctacctgggcctgggctccacccagatcgtgttgctggtgatgtccgtactgctggccatgctcaccatcgcgccgggccgtgccacccgcctgcagggcggagtgcacctggtgatcctggccgcctatatcttcctggccgccaacccgtaggcatccgggcgcccacgagacgtccgcgggtccgcgcccgggtgacgtccgcggggcgccggcctacgaggcggcctgctgcgagctgggtcgctgcccctcggtggccagctcgatgtccaccccgaacagcgggcagacgccgcagtcgttgcagtcgtcccagcggcaatccgccagctggtcgccggcgatcgccgagcggtactcgtcccacagccaggtgcggtcgagtccggaatccaggtggtcccaggcaagtacctccacctgaggacgttcccgggtggtgaaccactccaggtcgatgccgaacggcgccaactgctcggccgcgcaacgcgtccacagctcgtagtcgaagtactcgctccaaccgtcgaaacgcccgccggcgcgccacacggcctccacgacacgaccgacgcgccggtcaccgcgggcgagcaggccctcgacctgtccgggttcgccggcgctgtagcgcacggtgatggacttgcggaactggcggtcctcgcggatcgcgtccttgacgatggcgatgcggtggtcgatcacctcgggcgtcgcctggggcgcccattcgaagggcgtgtgcgacttggggacgaacccgccgatgctcaccgtgcaccgaatgtcgcggctgcccgagatctcgcggcccctggccaccacctgcttggcgaggcgggcgattgccgccacgtcgtcgtcggtctcggtgggcagcccacacatgaagtacatcttgaccgaacgccagccctgttcgaaggccgcggtcacggtggccatcaggtcggcctccgagacattcttgttgatcaccgcccgcatccgttcgctgccggcctccggcgcgatcgtcaatccggtgcgccgtccgttgcgcgacagttcctgggccagctgcacgtggaacgcgtcaacccgcgtgctgggcaggctcagcgaggtgttggtgccggcatagcgatctgccaggccgccggcgatctggtcgatctcggagtgatcggcgctcgacaggctgagtagtccgacctcctccaggccggtggcggccagtccgcggtcgaccatcgactcgatggtctgcacggagcgctcccgcactgggcgggtgatcatgccggcctggcagaagcgacagccgcgggtgcagccgcggaagatctcgaccgaatagcgctcgtgcacggtctcggccatcggcaccactggtgccttgggatagggccagtcatccagtccggtgagcacccagcggttgatggtcgccgggatgtcggcgcgcacgggggcgatccgggagatcgtcgcatcaggggcgtagtcgacctggtagaagcggggcacatagaacatgccggtgtgcgcgaggcgttccaggacgcccacccgtccgccgggacgcccctcgtccaaccagtcccgcacgatgcgtgacagctcgagggaagcctcctcgccatcccccagcacgacgacatcgacgaagtcggcgatcggctcggggttgaaggcgcagtgtccgccgaccaccaccaggggcgcgtcatcgtcgcgctcggcggcgtggatgggcaggcccgccaggtcgagggcattgagcaggttcgtgtagctgagctccgtggacaggctcaccccgatcacgtcataacccgacacccgacgatggctctccagggtgaactgcccgacgcccttggcgcgcatgaggcgctccaggtcgggccaaaccgagaagctgcgctccgcgctggcccagtcgagttcgttgagcacctcatagaggatcgccatgccctggttgggctggcccaccccgtaggtatcggggaacagcagcgcccagtgcacgcgggcgtcatcccaggccttgtgctgggcattgatctcgccgcccacatattgcacaggggtggagacctgcgcgagcagtggggtgagctgttcaaactgcgaggccggctcgggtcggcgatatccgctcactgtgcaaactcctgtcgaggtcacgatctgggcgcaacccagcactcagggtaatcaggccggtgaaacggggctgtcacgcgctgccccagccggtgctgccaggaaccatcccggggctgccgcagaactggcggggaccccaatacccctgcgggggatattcctgcgaggggccctgctgcggaccggtggcccagccgggctggccatagggagcggggggctggatcggttgggccggggcgggaggtgcggtcggcccggcggcacctggcgccgagacattggtgatcttcttgcgatgggcgcgccaggtcagcacgatggcggccaagaccaccggggccaggtcgatcaccagcactgccgggctcgagctgcccgcctcacggttgaacatgccgctgaaatcggtgaagggcagggtcaccatggccgtgaggttgttgacgatgtgcatggcgcaggaggcctcgaggcctccggtgacccagcccagatagcaaccgatcgaggcgaacaggaagtagttggcgttgagccacacgtcgccggcattgtgcagcagcatgaagaccacggaactgacggcaccgccggcaatcgccgacaggacctgcagcaggcgggtggtctgggggaagaagctggcgaccccgcggttgatgacgccgcggcacaggaactcctcgccgacgcattgcaggggcgtggtcagcagcaccgcgaagatcatgaacacggtgtccttgtgcattgcgagctcgcccttctcgccgaccaaggaggtgagtgttgccagcacgatccagaaaggcaaacaccacgccaggcaggcaccgaaccaccgccatcgaaagcgtccggtgacgcttgacatccaccgcatcggctggcggaacaccagcgagacgagcagcgcaatcgggatcaggctggcgagcgcgaggttgttgcccagaaacagtccggcggtcagccccgttcccggaccatcgatctttccggtgcgcgcgaaatcaatggcatagccgaacaacccaaaggcgaacccggtgccgaagaagcccgccagagtgactgcagcagccagtagtacccgccaccaacgccacttctcggtgcgccagaatccgtggtaatgggtcggccttgtcggcagatcgcgctcggccgggaggtaaggggcatactgccacgccattgcggcctgatcacgagccggcaccggggtggatccgctcgtcgggtattgcaggcgcgcggcgcctgcgggcgcggacgacaccgatgaatctgacaccgggaggccgtgaggaacacctgctggctcaggcaactgacggggttgtggcggaccccactgtgaagggccgggcgtgccgtcggattgggggtggttgttttcgctcataagtcctgtccgaaccacagcgccagctcgcgctgcgctgatttgggtgaatccgaggcgtgcaccaagttcatccgggtgctcagggagtagtccccacgcaccgtgcccggacgtgcctcggaaggatcggtggcaccatgcatggcgcgcacgatggtgatcgcattctcgccctcgagggcaagggccacaaccgggccacaggtgatgaatgcctcgacggccgggtaatagggcgcgtcgacatgttccgcatagtgcttggcggccaagtcggcatccacatgacgcagttgcatcgcgcggatccgcaggcccttgcgctcataccgggcgatgatctctcccaccaagccacgccggacggcatcgggcttcagcaggaccagcgttcgttccgaccgggcctccggggactggacttccggcgaggagacccccccgggcgggtcgtggcgcgattcactcactcccacaccttaaacaatgtgcctgtcgatctcggtggcgcgcccgtatccggcagagttcggctcagcgcggactgacgcaagcaacgctgggcgtgccgtgccgcgcctcaatcctcgtcgtcgacgtcctcgtcgtcggcatcgatgatggccgggcgacgttcgccgacctgcaggtcgtcggcgcccagtcgcaggggctgcccgacagtggtcacgtcgtggcccaccaggatgtcgcggacctcgcctgccaggtagaccgagccgatcacgagcacgccggcgccctcgccggactgctcagccagtcccatggccgtggacagtgcctgggagacgtcatcggcggtgcgcacccggttggcaccgaagattcccgtggccagatcggcaagctcggccaccgacatcgcgcgacggctgcccgacacatggctcaccacgatgatgtcggcaaccgcctccagttgggcgagcacctggtcgacctgcttgtcggccatcattgcaaccacggcgatcagcggacggaaggtgaaggcctcccgcaacgcctcgagggtcgccttcacgccatggggattgtgtgcggtgtcgagcaccacggtgggctcggaatgcaccgtctccaggcgcgccggagccaccacctggccgaatcccgcctcgatcaccgtcgggtcaaggcccttgccccccatgaacgcctcgacactggccaacgccagtgcggcgttgtgggccatgtgggcacccagcaacggaaggaagatgtcgccgatcgggcccgaggccgtgtccaggcgcaacagctgcccgctcacggcgggctgacggtcgagcaggccgaaatcgatgccctcacgcaccatgggggcccccacctcgaggcagcgttgggccaggacgcgtgccgcatcggcgctctggcccgcgatgacggccgtcgaaccggccttgatgatgcccgccttctcggtggcgatctcggcgatcgtgtccccgaggtactgcatgtggtccatcgccaccggaccgaccacggccacctgggcatcggcaacattggtggcgtcccaacgcccacccatgccgacctccatgatcatcacgtcaacgggtgcgtcggcgaacgccgcgtaggccagccccgtcatcacctcgaagaaggtcatctcgatgccgtccaggcgttggtcgtcgaccatcgtgaccaacggttcgacctgttcccacagctcgtcgaagcggtcgggggcgatgggctggccatcgatgcagatccgttcggtgaggtcctgcaggtggggtgagctgaaccgtccggtgcgcaggcccatggcccgcagcagggcatcgatcatgatggcggtgctgcccttgccgttcgtgccggtgatctggatcaccggggcgctgcgctggggcgaccccaggagctcgcacagtcgcgcaatgcggtcgagggagggtcccacgcggttctccggccagcgtccggtgagctcggagacgatatgtgcgtgacgttgcggatcgccggaatcaaagccgccggtcacaatgctgtgtcgcgggctgtcagcggggagcccctgggtgctgttcatcgactgcaagcctagccagtggccgtggagctcggcgccgacgcatcacgcggtcttgtccgcgtggcactcagcggggtcacaggcccgatatcggccgcttcatccgggtcgatgcaccccattgtcccgggtatgctgcccaccgtgagttccgaaccgagtcgcgtcaccccgccgcgcgcactgcgtcgcccgcaggattggcgcgattgggtgggactggcgctccgcctgctgaccggcgtcgtgatgatctgggcgggcgccaccaagatcggcaacctgccgctgaacgtggaacaggtgaagttgtaccagttggggttgggcgacacgctcagcacgctgatcggctatgcccaaccgcccctggagctcgtcgtcggagcgctactggtcgttggcctgttcacgcgcgtcgcctcggtgctcaacggcctggcgatgatcgtgttcaccttcggcatcgcctgggcatgggcgcacggcctgcgccttgactgcggctgcttcggccagggcggcatcctcagttcggaccagaagccccagtacctgtgggacatcattcgcgacatcggcctgcttgccgccagcgtctggctcgtcatccggccacgcaccgccctgtccgtggatggctggctgttccggccgctgtccgtcgatgacgacgaccatgtgcccgcccacgccgagaagacgccccaccagggctcctgaagctttcccgactgacccctcatgaaaggttgaccatggcctcatccaacgccgccaagtcggcgagtcgccgcgagcagctgcgcgccgcccgtgaacgcgaggctgcggccgcccgccgcaagcgcatcatcatcgtgaccgtcgtggtcgtcatcatcgccgccctggttgccgtgatcgcgatggccgcctccggcgtcttctccagcaagtcaggctcctcgacgaaggggactgccaccaccgtcagcgtgcggccccccaacgcctcccccggcgacaagggagtgttctccgccgacaacacgaacaactccgcccccgtgctgaccgtggtcgatgacttccagtgccccgcgtgccaccagtacgaaaccgtctatgggccggtgttcgagtcgttggccaagaagggcgagatcaggctcgagtaccgcacgcgctatttcctggacatcaacctgaagaatgattcctcggtgcgcgcggcccgggccgcagccattgccgacaccttcgggaagtaccaggagtaccacgacaccgtgttctcgaaccagcctgcgaaggagggcaccggttacaccgatgaccagctgcgcaacgccttcccgcaggcggccggaatcaccggcgacgacctggccaagttccagtccagctacgacaagggcgagatgaacgccttcgtcgacgccgtggacaagaacgccagcgccgacggctacaactcgactccgaccttcctgtccaacgacaagcagatcaagttcaccaattcggctcccaccgaggactatgtgatgcagatcgtgaaggcagcctgagggtcaccgacactcttctcgagacgcaccccgcgtcgttcccccgctggagcgacgcggggtgcttgcgtcctgtcagcgcgtcgcgcgcttttcgtgggcgggacgtctcgtgggcggggcggcgcatcgggcctgcgctcttgccgaaaatcccccatccggcatgattcctcatggatgatgtctccatgtgacatcgccccgggcctgcctgacgagggcacatggagcattcccggtgatcccacgaaaggttgaccatggcctcatccaacgccgccaagtcggcgagtcgccgcgagcagctgcgcgccgcccgtgaacgcgaggctgcggccgcccgccgcaagcgcatcaccgtcgtcgccgtggcggtggtcgttgcagcggtgttggtcgccgtgatcgccatggccgccggtggtgtgttcgggaaacggtcgggtggttccggggcaacctcaacggtggtgagtgtccgtcccccacatgcctcccccggcgacaagggcgtgttctccgccgacaatgtcaacgattcagcaccggtgctcaccgtgatcgacgacttccagtgcccgatctgccacacatatgagacggtcttcgggccggtgttcgagtcgttggccaagaagggcgagaccaggctggaataccgcacgcgctatttcctggacatcaacctgaagaatgattcctcggtgcgcgcagcccgggccgcagccattgcggacaccttcgggaagtatcaggagtaccacgacaccgtgttctcgaaccagcctgcgaaggagggcaccggttacaccgatgaccagctgcgcaacgccttcccgcaggcggccggaatcaccggcgacgacctggccaagttccagtccagctacgacaagggcgagatgaacgccttcgtcgacgccgtggaccgtcaggcccaggccgacggatacaacggcacgccgaccttcctggccaatgacaggaagatcgacatgccccgcaagaccaaccccaccgaggatgacatcatgaagctcgtgcggggcgtctgaggcctccgaccacccggaaaggacacaacgtccacggggtgcgtccgagccagccgacggcgtgggggccattcggcacgctcgataggatgtcagccatgaccgcagcacctgactcctcagcacaagacacacgttcggcccccgcgtcgggatcgtcgggctggaaggtccccgatcgtccggtactggagggcctggagtccaaatgggccgaggcctgggaggatgagcagctctacgccttcaagcggccggagagccgtccccaggtgttcagcatcgatacgcctccgcccacggtgtcgggttcactccacgtgggccatgtgttcagctatacccatactgacgtgatcgcccgctaccagcggatgctcggcaagcaggtcttctacccgatgggctgggacgacaacggcctgcccaccgagcgtcgcgtgcagaacttcttcggcgtgcgctgtgatccgtcggtgccctacgaccccgacttccagccgccggccaagcccgatgcgaagcaccagatccccatcagccgccgcaacttcatcgacctgtgccgtcagctcaccaaggtggacgagaaggccttcgagcagttgtggcaccaggtggggctgtccgtggactggaagcagctctacacgacgatcggcgaggagacccagcgcatctcgcagctcgcgttcctgcgcaactacgagcgcggcgaggcctacatggccgaggcacccaccatgtgggatgtcaccttccagaccgccgtggcccaggccgagctcgcggctcgggactacccgggcgcctaccatcggctcgccttccaccgccccgacggtgaggacgtcttcatcgagacgacgcgtcccgagctggtggtcagttgttgcgcactgatcgcccaccccgacgacacccgctaccagcacctgttcggcacgatggtgaagaccccgatcttcggcgtcgaggtgcccgtgttggcccatccggccgccgagatggacaagggcgccggcatcgccatgtgctgcaccttcggtgacctcaccgacgtgctgtggtggcgtgaactgcgccttcccacgcgcaccgtgatcggtcgtgacgggcgcttcacccgcgagacccccgactggctgcccgatccgaccttctacgacgacaagctggccggcaagacggtcttctcggcccgcgcggccatggtggaggcgctcaaggcgtccggtgagatgatcggggaacccgagccgacccagcgcaaggcgaacttctatgagaagggcgacaagccgctggaaatcgtctcgacgcgccagtggtacatccgcaatggcggacgcgatgacgagttgaagcagacgctcatcaactgcggcgatgacatcgacttcgtgccggagtacatgcgccaccgctacaccaactgggtcgagggcctcaacggggactggctggtcagtcgccagcgcttcttcggcatccccttccccatctggtaccggctggatgccaacggcgaccccgactatgacgagccgctgatggccagcgccgccgagttgccgatcgacccgacctccgacgtgcccgatggctattcggaggcccagcgcggcaagccgaacggcttcatggccgaccccgatgtgatggacacctgggcaaccagctccctgacccccgagatcgtgaccggctgggagcgtgacccggagctgttcaagctcaccttcccgatggacctggcgccccaggcccatgacatcatccgcacctggctgttcagccgggtggtgcgggcgcactttgagttcaacgaggtgccgtgggcacgcgcgatgatctcgggcttcgtgatggatcccgatcgcaagaagatgagcaagtcgaagggcaatgtggtggttcccaccgacatcctcgacaagtacggtgccgacgccgtgcgctggcgcgccgccatggcccgtcccggactcgactcccccttcgacgagcgccagatgaaggtcgggcgtcgcctggccatgaaggtgctcaacgccagccgcttcgtgctgggcatgggagaggccactgatcccgaagagatcaccgtgccggtggacgtcgccgagatgaccgccctgcgcgccgtggtggccaaggcgaccaaggacctcgaggcgttcgactacaccagcgccctggaagtcaccgaggagttcttctggagcttctgcgacgattacctcgaactggtgaaggaacgcgcctacggcgcccagggaccccgggccgcggcttcggccaatgcgtcactgcagctggccctgtcggtgatcctgcgcttgctggcacccttcatgcccttcgtcaccgaggaggtctggagctggtggaagcctggctcggtgcacactgcgagctggcccaccgtcgacgagttgccctccacgggtgacccgcagctggtcaccgacgtggccgcagcgctcatcctggtgcgtggcgccaagtcggacgccaaggtctcgatgaagaccccggtgatcgacatcacgctcagtggccccgccaccgcggtggcccacctgaagtcggcagccgccgacctgagcgcggtcggccatatcgagaccgacatcgcctggcaggaggccggcgacgaggtgggcgcccagatcaccctgggcgagccgccggtgaagaaaaagaagaactgacgctccacccgcagggggcgggcccgaccaggtggttgggtccgccccctgcggcgttcagccagcggttatcacccgaacggcagtgatccgacgccgcgaacggtcagggcaggcggacgtcgagctggtccagcccgccgatcatcggcacggcctggtcacccgagcgcacctggtgttcactgtccggggttccgtcctcaccgatgcggtcaagccacaccgccttgaggcccgcctgcgccccgccgtgggcgtcgcggaacaggtcgtccacgtaaccgacctcacccggctcgtggccgatggcccggcaggcggccagatatgcgcccgggtcgggctttccggcgccgagctggtcggcacacagtacggcggtgaagcgatcgtccaggccgatccggtggatcttcctgcgcgtcatgtggtgtgcggagttcgacaacacggccacgggcacctgcgcggcacgggcccggtcaagcaggcgcagcgcgtcgtcgaaggcccgacacgagtcgatgaacaccgcgcgatagctctcctcgaagctctcgtactgctgatccgagagctggttgtcgagctgggcggccatgtctgccagccggccgcggcgcatcgtctcgaagtcgatctggcccgaggagaagcgctggaaccatccggcgccatcaaatgcatagcgttcgacagcggcgtgcagccgctcctcggggacctgcggccacagcccgacggcggccgtgcgcaatgccacccgcatggccggcgtcgtctggttgatggtgtcgtccatgtcgagcaccagggccctcacatgcaacgtcaggggttgggaaggactcaccggtcaagcatagggtcgcggcccagcccgttgtgttcccagcccgttggggtccaaccccactgggatcccagccgggcgcggtcagtcgccgaacccggtgccgacctccttggccgcccggatccacgggtggtcgacgggtacgcggcggatcttgccggccacctcctcgagcggaaccggctctgccccgtcgcccttcgcggcgaccatgacaccgaagacgcccttggcgaccaggtcggcgccggcagtgccgagcacggtggccagcacgcggtcgcgtccacagggcgtgccgccgcgctggacgtagcccaggatggtcacgcgcgattcgagtccggtggccttctccagctcggtggccagcgtgaaggtatgggcccgatgcgaggcctcgacattggcccggtgggtcttcgcggcgtcgcgggccaccggtgaatcggcctcgcgcaccagtgcgtcggcggcggcgagttcggcggcgtcacgctcattgcgcgcgccctcggccacggccaccaccgagaagttcgagccatgggcggagcggcggctgatggccgcggcgatggactcgacgttgtagggcacctcgggcagcaggatcacatcggcgccaccggcgatccccgcacccaatgccagccatccggcacggtgccccatgatctcggtgaggatgatgcgatggtggctgtgtgcggtggaatggaggcggtcgaccgcatcagtggcaatctccagggccgtggcgaacccgaaggtctggtcggtgcccaccaggtcattgtcaatcgtcttgggcagcgtgatcacgttcatgccggcgtcggacaggcgcttggcgttcttggcggtgccgccgccacccaggcagaccagggcgtccagcttgttcttctcgtagttcttcttgatcacggggatcatgttctgcaccttgccgtcgaccagcatcttgtgcaccttgtcgcgactggtgcccaggatggtgccgccggtggtgaggatgccggacagtgcgtgcgagtcgagctgcatgaagcggttctccgccaggccccgcatcccgtcgcggaagccgatcagttccatgccgtaggtgctcacggcggccttgccgaatccacggatggcggcgttgaggccggggctgtctccaccggaggtgagaattccgacgcgcatgctcattgctgtctcctttgttgctgatcccgtccgatgacgatcgcacgggaatggttcgatggtcgccgcgccggtgctgagctaggcccgcagggtgcccacggtgtcggccacgagcttcttgagggcgcccaggtcgtcgcccatctcgatgacccgacgcggcccctccccgatgtgggcgaagcgcggcggcacgggtggcaactccccggtggcctccttgatggtgtcggcgaacttgaccggaagtgcggtctccagcaccacgatctgctcgtcgccggcgaactgctcggcgacatggacgccgtcggcggtgtgcgggtcgatgaggatctggtcggtggtccacaggcgcttgatggtggccaggcggtctgcatggctggaatggcccgagacgaagccgtactgctggctgacggccgtgaactgcgccgtccccgagatgtcgaactccccggtgcgggcgagctggtcgaacagcctgcgcacggtcgcaccgtcccgtccgaacaggtcggcgatgaagcgctcgaagttcgaggccttcgaaatgtccatggaggggcttgaggtggccacggtctcgacggcgccgcgcacccggtatcggccggtgtggaagaactcgtcgagcacgtcgttctcattagtggccacgatgaggcgcttgatcggcaatcccatggagcgggcgatgtgcccggcgcagacattgccgaagttcccggtgggcaccgcgaagctgatctgttcgtcggcgctggtggtgacgcgcagccagcaggcgaagtagtagaccacctgggccaccaggcgggcccagttgatcgagttgacggcaccgacgtgccagcgatgcttgaactcggcgtcggcgttgagggccttcaccaggtcctgacaggtgtcgaagacgccgtcgaccgcgacattgatgatgttgggatcctgcaggccgaacatctgggcctgctggaagggggtcatcctgcccgccggggtcagcatcacgacgctcagcccgtcacgtccgcgcatcgcatactcggccgagcttccggtatcgccgctggtggcgccaacgatggtcagccagctggaccggcgacgcagctcgtactcgaagaactccccgagcaactgcatcgccatgtccttgaaggccgccgtcggtccattggacaggtgccccagccacaggggttcgtcgccgatgcgcgtcaccggcacgatctgggggtcgccgaacttctcggcggtgtaggccctgcgacacagttccagcaggtcatcatggccgatgtcatcgatatagaggccgatcacctcggcagccagcgccgcatagccctgctcggccagcacggcgcgccaccgggtgagggtctgtgcatcgacccgggggtaggtgacgggcaggtagaggcccccgtcgggggcgaggccttccagcaggatgtcggagaagggctccgaggcatcggcggacgcggcacgggttgacacatagcgcacgtcatcaggctacagtccgagcaccgcgccgtgccccacggcaacgatgcgagaacccgaccgaccggacaccgggattgcgggggccatgaacgtggcggggaggaagatcgggcccatgccatcatttcgagtgcagttccaggtcagtggcctgcgtcccgggcaccgtcccgacgaggtcctggaggtggcgcgggcagccgtggtggcgccgctccactgcgacgatgtgcgcctcgacatgcccgcggggctgccgacggtgaccgtgcggttcaccatcgcgggctcccatgatgccgacgaggatgcgcgcgcccggcgccatggcgcccagatcacccagcaggtgtcacaggtggccgtggtgtctcccccacgggtgctccgccgacgcggcgggagttggttgccgattcccgcgctgtgactccccgtcccgagcgcggggccggaacgtgcacgacccgcacgccgatccgggaatccggggcgtacgggtcgtgtgctgagggctggcgtgggccagcggtgaacagtgtcaggcggacagcttgtgccgttcggcgatctcggcccgggtgagcatggtcggttgggcgtcgccgtgcacgacgtcaccggtgatcaccacctggccgatctcctcatggctgggcacctcgaacatcacgtcgaggagggtctcctcgaggatcgcgcgcaatccgcgcgcgccggtgttgcgggtgaccgccttctcggcaaccgccgagaccgcgtcgtcggtgagctccaactccacgccgtccagctcgaagagcttctcgaactgcttgaccagcgcattgcgcggctccacgaggatgcggcgcagcacatcggcgtcgagcctgggcaccgtggtgatcacgggcaggcggccgatgaactcggggatcaacccgaaggtgtgcaggtcctcggggcgcacaccggcgaagggatcgagtcccactggctggcgcttgaccgaatcgttggtgaagcccacgccaccctggccgacgcggtcggcgatgatctcctccaggccggagaaggcaccccccacgatgaacagcacattggtggtgtcgatctggatgaattcctggtgcgggtgctttcgcccgccctgcggcggaacggaggcgacggtgccctccaggatcttcaacagcgcctgctggaccccctcaccggagacgtcgcgggtgatcgagggattctccgacttgcgggccaccttgtcgatctcgtcgatgtagatgatgcccgtctgggcgcgcttcacatcgaagtcggcggcctgcagcagcttgagcaggatgttctcgacgtcctcgccgacatagccggcctcggtcagggcggtggcgtcggccatcgcgaacggcacattgagcatgcgcgccagggtctgtgccaggtaggtcttgccgcacccggtggggccgatcaacaggatgttcgacttcgcgagctccacatcgtcgtcatgcttcgacgagctgtcggcctgcgcctggacgcgcttgtaatggttgtagacggccaccgcgagcgccttcttggcggcgtcctgcccgatgatgtaggagttcaggaaggagacgatctcggcgggcttgggaagctcgccgccctgttccttctcggtgctctccgagaactcctcttcgacgatctcgttgcacagatcgatgcattcgtcacagatgtaaacacccggacccgcgatgagcttcttgacctgcttctggctctttccacagaacgagcacttgaacaggtcgccgctctccccgatgcgcgccatgacgccccctctcgtggacactcagagtaacccgcccgggcggtgggacaagagaccccaccggcccgggcgggctttggtgcttagttgcaggagcgaccgctcaggtggccccttgttttcacgagtccttgagcgacgtcaggatgtcgtcgatgaggccgtattccttggcctcctcggcggtcaggtacttgtcgcgctcgacgtcgcggttgatgcgctccacgggctggcccgtggcgtcggccagcatctgctccatgaggctgcggatgcgcaggatctccttggcctggatctccaggtcggaggactggccgtagcttccctccccgctgatggcgggctggtggatcaggatgcggctgttgggcagcgccaggcgctggcccttggcaccggccgcgagcagcactgccgccgcggacgccgcctgacccaggcagatggtctgcacggcgggcttcaggtactgcatggtgtcgtagatggccgtcagcgcggtgaaggaaccaccggggctgttgatgtagatcgagatgggacggtcgacgtccatcgactgcagtgacagcagctgggccatcaccgcattggcgacatcatcggtgatcggggtgccgaggaagatgatgcggtcctcgaacagcttggtgtaggggtcaacccgacgcacaccgtaactggtgcgctcctcccactgcgggatgtagtactccgccgacggcgaggtggccaagccaccgggcgccaccggggactgccctgccgtaggcagaatcagaccgggtgtcacattgttggtcatgaaggtcctcactggttcagaagtcactgattcggggcgtcggtgtcagagatcttggacgcacgctcgtagacatggtcaatgaagccatattcgagtgcctgctgcgccgtgaaccagcggtcacggtcggagtccttctcgatctgctccaccgtctggccggtgtgaccagcgatcagggcggccatctcatgcttgaggtggatgctctgctcggcctggatcttcacgtcagacgcggtgccgccgatgccgccggacggctggtgcatcaggatgcgtgcgtgcggcagcgcaaagcgcttgcccttcgcaccaccggacagcaggaactgacccatggacgcggccaggcccaatgcgacggtggccacgtcattgctgatccactgcatggtgtcgtagatggccatgcccgagtcaatcgagccgccgggtgagttgatgtacaggtagatgtccctgtgcgggtcctccgcgttcagcagcagcatctgcgcgcagatcgcgttggagttctcgtccttcacctctgagccgaggaacacgatgcggttggccagaagtgactggtagacgttgtcactcaggccgaaaccgctggctcctccggccgccagggagggcagcacggggtttttcgcgatgtcgttcacatgtccgaacctacccgtagccgaccccaaaccggaggaggagggtccgcatttcgcttccggcgtggaagttgaggcgtggggactcaagtttggggatcggcgccgacgacgctcggctcgggggcgatcagcgcactcacccaccgcgacttggggtcggcgtccaacaccaacgacttgaccaactgggtggccggcagcgcgatcagcgcccccaacggcccgaacacccaggcccagaagagcagggagatgaacgacgtggtgatgttgacgcccaccgcgttgccggtgaacttcggctggaagaagccctgcacgatccacgtcgtgacgaagtagatggccatcaaccacagggcgttctgccacccgttgaccaccagggcgacgatgaccggcggcaccatggcgaagaaaaagccgactgaggggatgaaggtggtgatgaaggtgagcacgacccacacccccatcaggggcacattgaggatcttcagctcgatggcgttcagcccggccatgatggcgccgaagaccatcgacaccaaccagtagcggcgggtgccgtgggcgaaatcgcggatcgccccgatggcgcgcgggtggcccacttcgaccatgccgagccgcctcttccaccccaccgaatcgaccagcagcatcaggatcgtggtcagcgccaccgtaccggcgccgatgctgcccgagatcgagccgagcaccccggtgagggccgacaggacgttgttcgggtcgatgcggctgtagaagccactcaccgcatcggcgctgatgtggtgctgcaccaggaactgcatcaggtcgccgtacatcgcctggatgcgcggcacatagctggggatcgcaccgatgagcgtgcccaccgcccatgccatggaggccaccgccaggatcaccaccgacagcagcgcgagggccatgacgatggcggccaacgccctgggccacttccgcctggtcaggcctgagtagatcgggtagaaggcgatcaccaggttcagccccaggaagaccggggccagcagccacgacaactgccggaacagccagatgctaccggcgatgccgatcatggcgatgaagatgacgctcatgcgtggcagccaccggggttggccacggaagggcccctgggccacgctggtgctcctcgtggcgcccgacgagccggccttcttcgggcggtcctccgcccgggcggtggcggccccgccgacgccaggcgaggtgcgacccgtgtcatcctgtgacgaagtgccggcagtgccgaactgatcctggtcggattgcatgatcgtctcctcgatggcgccgggtgcgtggcgacgcggcacgtcggggtcagcttaggggacgcgatcaccctgccgtggcacagttccaccagcaacccacaggggtccatcgggaaccgacacagctccaccgggaaccaccacggccccgccggggaagcaccacagggcacaacggaccacgcctgctgcgctccccgtcaggacctccaccgggacgggggcagaatcacagttcggcctgttgcgccgccccctgggcatcgcccggattgctggcgatgaaggcattcacccatcgcgcccggggatcagtgtcaatgatcagcgccttgaccagcagggtcatcgggagcgccagcagggtgcccagcccgcccagcacgaggccccacacgagcaacgagatgaacgagatggtgggcgtcacgccgacggactcgccggtgaagcgcggttggatgatcgactgcaccacgaagttcagcacgcagtacagcaccacgaccaccagcgcctgcttccagcccagcgccaccagcgccaccagtgccggcgggatgaggcccaccacgaagccgatattgggaatgtagttcgtcaggaagctgagcaggccccacacgatgggcagcggcacgccgatgatcgccaccgcgatcacgtccaggacggcgacgatgaggccgaacaccgaggtgaccacccaatagcgacggatcccgcggctgaacgagaccagcccggtgaccatgcgcgaatgggtggcgccggcgatgcggatgcgggccgcgaagccggaggtgtccatggccatgaacaccagggtggtgaccaggatcgccaacatggcgacgaagccggaggcaccattgagcaccgagctcgccgccgagaagatgctgttgggatcaatgctcttgaaggcctgcatgaggctggcctggtcaaagccgagttgtgctgcgcggtcgatgaaccagttgaacaatccggtgaactcatcggcatactgcggcagcagcgtcacggtctcgttgaccgaccagaccaggccggccaccatcgccagcaggaccacgaagacgacgagcgcggtggtcacggccgacagcggcgaggggcaccccttgcgcaccaaccaggtgtgcagcggatacgcggtgaccatgaggttgagcgccaggaacatcggcgcgaaggtgctgccgaattccttgagcagcaggagcgcacccagggacaacacgatgccgccggcgatctggagatagcggggtatccccggcgaacgggtcggcggcgcagcggcttgggtcggggacgtgggccccgcgacggtggtgccgtcgtcctcggcgagcgcgtacgcggcagtggcgccatcggggatgaccggctctgcttcctcgggttggctcatcggccgatccttccagtggtgtcacacaacagtgttgtcgttggggcgtgtcctcgtacaagcgtggtgccacgcacagcactgtgtgtcgcaggccggggaaagcctagcaagcacgagcgccgcccagatgcatcagccaaacacagaatcgggagcccctccgaggaaggactcccgattctgctgccggtgctcaccgtggggcgatcaccggtggacgatcacttggcgtcgtcggccggcgcctcatcagccttcttggcggccggcttcttcgcggcaggcttcttggccgcgggcttcttggcagccggcttcttgtcagccttgggggccgccttcgacgccgccgccttggtggccttggccgcgggcttcttcgcggcgggcttcttggcaggcttgtcggccttggcgtcctcggccttgtcggcgtcctcggccttctcatcggcagcgggctcggcgatggtgccatcggcctgcaggtgcttcagatcaaccgcgttgccgtcggtgtcggtcaccacggcctcatcgacgatcgtgttgagcgccttgccgcggcggacctcgcccatccactcgggcatgtggttgtgctcgctcatgtgctggagctcctgctccggtgtggtgccgttctgctgggccttctgcaggatgagctgggtgaactcttcctggctcacgccgacgttctgctcctcggcgagcttgtccagcacgatctgtgcgcgcaggccctgctcggcacgcttgtcgatctcggcccagaactcctcgggggtgtcggccttctcgtcctcggcctcctcgaggtactgctcgagggtgaggcccgactggttgagctggttctcgatctggtcgtggtagcccttgacatcggcttccagcaccgcaggcggcagctcgaagggaaccttctccacgacctgctccacgatcttgtcgcgggcctcattggcctggccgatgcgggccatgcgctcgaggttgtcacgcaggtcggccagcatctcgtcgaccgtgtcgaactcggagaccagctgggcgaagtcgtcgtcaagggcgggcagctcctgctcgttgaccttgttgaccgtcaccttgatgtccacgtcctggccgccatggcttccgcccacgagctttgagctgaagctcttctcgtcgccggccttcatgcccaccagcgcctcatcgaggccgtcgaccatgccgcctgcgccgacgcggtactgcatgccattcgactcggcgtccggcacgggctcgccgtcctgggtggccgagagatcgaagttgaccacatcaccatccttggcggcgcggtccacctccttgaggttggcgaagcgctcgcgcagcagctccacgcgctcgttgacgtcctcgtcgctcaccttggcgggctcgacctcgaccttgatgcccgagaaatcaggaatatcgaagtcggggcgcacgtccacctcggccgacagctcgacgacatcgccgtcctcaagcttcgacacctcgatatcgggctggcccagtgggaagagctcattgtcctggacggccttgctgtaggcgtccggaatcgcgtcgttgatggcctgctgcagcacggcaccgcgaccgaagcgctgatcgatgaggcgggccggcaccttgccacggcgaaaaccgggaaggttcacctgctcggagatctgcttgtaggccgcgtcgatcttcggctgaagttcggcaaaaggcatttcgatggtgagcttcacccgagtcgggttcaacttctcgacggtgctgggcactaggactcctgatattgggacaagacacgcaggcgcgtacatacaacgcctgccaatcctaaccagcggcctcggacgacgccaagatggcccgtgcggggacatggggacgcagacgcgctgtggttagtggagcgaacgacgggaatcgaacccgcgtagccagtttggaagactggggctctaccattgagctacgttcgcgctgcccgctgccgggcggctgtcagcttatacgatcatcgccgtgaacgccgatccggcgccatccgcaggcccgatgagtggccccgccggggcaattccagccagcccacccagtacccgggcaggttccaccacggcgcggcaacggggccgtttgcggtagcgtgcactgtgctgcagacccggaacggactgcaggattcatcgcactgcagggttcatcgcacgtcagggttgaacgagctgcagggcccaacggggtgtggcgcagttggtagcgcgcctgctttgggagcaggaagtcgccggttcgagtccggtcaccccgacccccggccatcacatggccacgaacattgctgggcatggtcaccgaacatgagcgtgtcgttggtcatgccccccgcatgaccaacgacaccccaaaaagataacagatcccgcttgtgggggcatcggccgatcccccacgtgactagcggattcgccaacattcacagtttctgtgaatgatctgtacatctggttcaggcgacgaatttcagcccgacgaccccgccgacgatcatggccagaaacacgatgcgcatcgcggagacgggctcctgaccggtcagcatcgagatggtgaccgtgagggcggctccgataccggtccagaccgcgtacgacgtgccaaccggcaggcggcgcatcacaaatgccagccccgccatgctcgccaccagtgcgagcgcgaacacgaccgtcggcaccagtcgggtgaatccgtgggaacgacccagggcaagggcccagacggcctccaggaacccggacaccaccagaacgatccatgacatgacaacctccatgggccgtcttgtcgcgcaccgggtacggcacccctcgtccgggaagccctcaacgggcaactggcccaaggttaaccgacgccccggacgcaaagacggtcaggagcggcgcccggtgatgctgcgggccgccgtggaacgcgccgcactgcgcatggcggcagtgggatggccgatctcacgcacccggagcgcccgatccgcatccaccaagggggtgatgccgtcgcgacccaattccttgggccgcgcgtccttcgatcgtccggacctgccccgtgcgtccgccgatcccttgtcgtgctgaccgcgcccacccccggggcggggatctgctgtgtccgtcatgcccccatgctgccatccgggcgatgatccgtcaggcgggagctgggccacgccacggacgcagggcatcgtccgaccggcgccgggccgtcccggacacgccccacggtgcgacacatgctgcgtcttccccgccgtggccgtgcgctaggttcggggcgatgaggggatcacagtgaccgggcaggatgcgatgcgacgacagttggaatggcatcacctgcggctgaccgccgggtcacacgccggcagcgtcgccctgtccgacgccgaggacggtcgcccgctgggcaccctcaccgtcgacttccccaccccgtgggtccccgggccggccacgctggacgatgatgagtttgagtggcagtggacccgcgacgaccagcccgcggacgatgccacggcgccagcccacctgtcgtccacccgcccgtcgtccaccgacctgtcgtccagccaccaaccgtccacccggcaaccgggttccacgcgcgccacggtgcgcatcagcacccagccgggattcagcctgcgcgtcgcactggcgacccacgctgaaacggtcgccgtggagcccccgaccctgctgtggacgccgccggggccggcccgacgttgggtgggcggcagctcggcgcttctggtcctcgacgaccgaccgggcgatggcctcgtcacggcggcacacctgagccacggtcaggcctggccggacgaggccggcacgacgcctcccccgtcccgaacccggacaccgggcgggtcggcgacccatcgcattgcgctgggcccgcccctgctcaccctgactcccgagcgcggctattccaccacctgggtgatcgaacgcttcgccagcctcatgaacgccaccagcaccctgccgggttggctgcccccggactgcacgccgcgcgccggtgagccgctgttcatcgacctgcccgacgccgcagtcaccggtgacgtggagatcgtcaccgacgaacacggcacccagctcagtgccgccggcggcacgcatgacatcggcatccacggtcccggcatcgattccagcttcaccatcacctggaacgccggcaccgaccgcgtcttgcgcgatgttgccgccgccatcctgggccaggtggacccacgcaccgcccggggctccgacgcagccctgatcgacagggccgacaccgcccacctgatcccccatgacgacgccgaacgcttcctggacgacttcttccaggagctgagcgatgccccgccgggcaacagcatcgcaccggaggcgactgccgcactgctgcactgggcgttcgcggacgccacgcgcatggccgcggccctgcagcgcctggacggccttgctcccggccccggccccatgctcgcctggctgagcgcatcgctggccgcccgggcggccatgctcgatttcgacgccaccgtgccgatggatccccacgacccgctgtgcggggccctgcatgccatcctcacccgggccgactcccccaccccggccgtgtggcagacgatcggattgctccacggccccctgcccggaccgctgccggacggcgattctgtgcgcaccgcccaggcctgcgccatcctggcgctggccccgacgaattggcaggtcgagcagcggctcggtgccagcctcgcccacgagatcgaggacacgcgcgcgtggctggcggcgtcctcgcccgacgggccgacgctgagctggttgttgtgggcctagctgcgccggtcgcgggtttcgggcggggtcccgggtgcgccactggccctggtcgtcggggctgaggtttccggcgcgggggtttccggcgcgggggtttccgacgccggggtttccgacgccggggtgggaccgtgctcaagcagctcccggaactgtgcctcgtcgagcatgggcactcccaactgctcggccctggcctgcttggacccggcgttctcaccgaccacgacgtagtcggtatggcggctgaccgatccggcggccttgcctccccggtcggtgatggcggccttggcggagtcccgggtgaagtcctgcagcgacccggtcaccaccacggtgagcccgcgcagcgtctgggccggccgggcgctcttctcatcggccatcgagaccccatcggctgcccaggcgttgaggatctcgaggtgccagtccacggtgaaccagtcgcggacggcctcggcgatgatcaggcccaccccgtcggtgtcggccaattcctccacgcccgccgcgcggatcgcgtccatggaaccgaacctggccgccagggcacgggccgccgtcggcccgacatggcggatcgacagcgccaccaggacccgccacagcggttggtggcgggcagtgcgcaagttttcgaggagccggcgtccgttggccgacagcacgcgtccatccctgatgccgggcggcggcaccagggccggttccttcagctcacggggcgtggcgccgcgggtgtagaagggcacggtcaccagctgctcgggcgtcaggttgaacaactgggcctcattgtccaggacgccggccctcaggatcgcgtcggccccctgatagcccagggcctcgatatcgagcgccgaacgcgccgcgagcgagaacaggcgttcgcgcaactgcgcggggcaactcttcgagttgggacaccggatgtccttgtcgctctccttctccggggccagcttcgtgccacaggacgggcagtgggtgggcatcacgaaggggcgttcggcaccggtgcgcatctccaccaccggtcccacgatctcgggaatcacatcgcccgccttgcgcaggaccaccatgtccccgatcaggacgcccttgcgctccacctcgtaggcattgtgcaatgtcgcgctggacaccaccgacccggcaacctgcacgggctccatcacgccgtagggggtgacgcgtccggtgcgccccaccttcacgcgaatgtcgagcagccgcgtgttcacctcttcgggcgggtacttgaaggcgatggcccagcgcggcgcccggctggtgacccccagctgctgttgctcggcaaaggaatcgaccttcaccacgatgccgtcgatctggtggatcaggtcgtggcgatgctggccgtagtaggtgatgaagtcaagcacctcatcgagggagtgcaccaccttgttgtagggactgatcggtagtccccaggccttcatcacggcgtaggcgtcggattggcgcgtcacggccagtccgtcggcaacgcccaggccatggcagatcgacgacaggggccgttgcgcggtgacccgggggtccttctgccgcaacgagccggcggcggcattgcgcggattcgcgaactgcggcttgccctggtcggcgagcttgtcgttgtaggcggcgaactccttcagcggcacgaagacctcgccccgggcctcgaacagggccaggaaatcctgggcgggatcggggcgcaggcgctgcgggatcgccttgatggtgcgtgcattgggggtgatgttctcccccacccgtccgtcgccacgggttgccgcggtctgcaaccggccgttcacgtactggaggtcgatggccaacccgtcgatcttcacctcgcacagccactcgggggtgtggcccagcgcggcctcggtccgggtcatccactccttgagctcgtcgatgctgaagacgtcatcgaggctgagcatctgcgagggatgggtgagcggcgagaaatcggtctcctcctggggcgcccccacgcgttgggtggggctgtcaggggtgcgcaacgagggatattcggcctcgagcttctgcagctcgagcatcaattcgtcatacagcgcgtcggtgatgaacggcttgtcacgaccgtagtaggcctcctgcgcgtcgtcgatctccttgaccagctcagcgtgccgtcgctgctggtcgacaccggcaaccttcaccgtcactgcggcatcaaggccggtggggatgtcctcgtcgggatcttcgtgcgctgtcatgactccatcatgccaaccgccgataccctcgccgaacggcaaaccatgcgggcggtccggtcagcgcccggaaacgtcattcgctccagcggggacgccagctggtggcctcgcgggccaccgtgaagcccttgaccacctcatgctcattgagctcctcgggctggttgagcaaccattcggccagcccgttgcgttcgatcacctcgacgtcatcgggggcctgctggatcgtcaaccgccgatccttcaccggcacgatgatgccggtgacgcccaggtcgagtcccgaatcgcggctcagcagggtgcgtgcggtgctggcctgcacgcggctgaaggagacatagggacgatcgtgcccattcaccaggaaggtgtcgccctccacgaagagcttcgcccccggatggttcttggcattgagcaggtagaccccgccggggccgaccaccatgtgttgcagggccgacaacccggagttggagcgggccagctgcaggaagccccagcgcggatccagcgcggccaaccgcagcagctcctgggcgagcaattcatccgcatcctggtccaggcgccgcgcggcctcctcattgctgcgtcccagcaggcggtcgatgagcgcgcgcagcccggtgacggtgcgttgggcctcatacccggcagcgccaccacgcaggaaatcgtcccaatcaagttgcgacgaggggtcgggcattgcgcgacgcgccgaatagctggccgtcacccgggcgacggcaccggccatgggatcgatcgcacggcgagccggggtgtagtccgccccggcctgctcgtcagcgcccatctcgtcgttgtcctcgatcgcgcgacccacctcgtccacagcttcgctccttgcattgccccgggttgcgttgccccgggcgccaacactccggtctgttcccgggacaaggattgcaacgatcgtggggccccacaaatgacctgaatgaattccaattacgagcctagacgagaccgtggcccgttcacaccgcgccccggcggcataggtcccgattcggggccgacgctaatgcaatggccgtcggcccggggtgtcgctcagtcgaagatcggctcgcgggtgcgggtgcgcttcagctcgaagaagccgtcataggcgaccatcttggagaatccgtcgaacaaatctccggcctgctcccccttgggcgcgggactgatcaccggtccgaacagggccatgccgttcatgtggatcaccggggtgcccacatcgtcgcccaccgggtccatgccctcatggtggcttgcgtgtagtgcctcgtcgtagacgtccgtgtcggacttgtcggcgatcgactcatccaggccctgtgcccgcagcgccgcgcggatcacctcgatgtcgccgcgcggctcgtcgtggaggtgatagcgcgtgcccagctccgtatagaaattgcgcagcgcctcggggccgtgctcctgttccaccccgatgcaggcacgggcaccctgccagaaagtgtcgatcatcttgcggtaacccgcatcgaggtcacgcccctcattgagcaccgccaggctcatcacatggaaaacggtgtgcaccgggcgcaccttttccacctcgagcatccagcgactcgtcatccatgcccaggggcatgcggggtcgaaccagaagtccacggtctgcgtcgaatcactcatgcatacagcctcgcctgttcatgcgcccggaacaaggccaatgccgtgacaatcaccacgcaatccccggcggacgcccggcgccgcgggccactaccggatcaaatggcccgggcagccgggtttcgggcttcctgaaaggcagttgacaagcaaaaatatctgcgacgcgcgacccctgcgtggccttgcatcttgccttaccgatagcctcacaggtggaccgacatgtgaatggcggccccgagccggatcgtcatcgggtggaacctgctgaattggggatcagccgcatgacgacgagcgcacggcatcacgtcggaaatagtttggagcctcacgatgaaccctgccaacctcacccgtgacgagactcacgcacggtcggcgatgctgtcggtcacgtcgtaccgggtcagtgtcgacctcacgggcggcgatggattcggcagggccctggccgaacccgatgagaccttcgtgtcgaccagcatcgtgaacttctccaccagcggtggcgacacctggatcgacctcatcgccgattccgtcgtctcggcggagctggacgggacccgccttgacgtctcgaccttcaccggggtgcgcctgcccttcagcgccgaggccggcgagcatgagctgcgcatcaatgcgctgtgccgctattcccacaccggcgagggcctgcaccgcttcgtcgatcccgccgaccagcgggtctacctctacacgcagttcgagaccgctgacgcacgccgcatgtacgcctgcttcgagcagcccgacctgaaggcaagcttccagctgagcgtcatcgcaccgagcgcctggacggtggtgtcgaactcaccgaccccgcccgcgaccgccacggacgccccggccttccagcgctgggacttcgaggcgaccgcccccatctccacctacatcaccgcactgatcgccggtgagtacttcgtgaaccagggcacgatcacctccacgaagggcgagctcggcgcgaacatcgtctgccgccagtcggtggcccagtacctggacgccgaccgcatccgcaccaccacccagcggggcttcgaggtctatgaggaggccttcgggcgcccctatcccttcgcgaagtacgaccagctgttcgtgcccgagtacaacgccggcgccatggagaatgccggcgcggtgacgatccgcgacgagtacctctaccgctcgaaggtgacctcggccgactacgagcagcgcgacaacaccatcctccatgagctggcgcacatgtggttcggcgacctggtgaccatgcgctggtgggacgacctgtggctcaatgagagcttcgccgaatggtgcagccacttcgcccagaagcggatcgtcgaccgcttcggcggaatcgacccgtgggtcagcttcgccaatgcccgtgagggctgggcctatgtgcaggaccagatgcccacgacccatccgatcgcggccgacatggttgacctggagacggttgaccagagcttcgacggcatcacctatgccaagggcgcctcggtgctgaagcagttggtcgcctacgtgggcgaacagaacttcctcgccggcgtgcgcgagtacctcaccgaacatgcctacgcgaacgccgagttctccgacctgttgggtgcgctgcagaaggcgtccggcaaggaccttgacggcttcgccgagcaatggctgaagaccagcggcgtcaacaccctgcgcgcgcaggtcgaggtggacgactcgggggccttcacccgcttcgacatcatccagaccgctccggtggagcatccgacgctgcgcacccaccacatcggggtcggttgctatgagctgcgcgacgggcaactcgtgcgcaccacgtccctcgaactcgatgtgagcggtgagcgcacgtcggtcgacgccctggtgggccagccccgtcccgccctggtgctgctcaacgaccaggacctcagctacgccaaggtccgcctcgacaagcagtccctggacgccgcgatcgagcacatcaccgagctggccgatccgctggcccgggccgtggtgtggacctgcgtgtgggacatgaaccgcgatgccgagctgaccaccgacgagtacatctcgacggtcacccgcggcatcgggtcggagaccgacatgacggccgtgcgcacccagctgcgcaacgcactgggagcctcgaaggcctacaccccgccggcccaccgtgaggaggccaaccgcgccctggtggcgggcatcgccgccgagctcgagaaggccgaacccggctcgcagcaccagctggcgttcaccgacgcactcatcggatcggttgactcccccgagggaatcacgctgatccgtggctggctgagcaatgaggaggtgccggtgggcctggagatcgaccaagaccgccgctgggcgattctcagctccctggcccgcatgggcgccgtcgatgacgacgcgattgccgccgaggaacagctcgacaagaccatctcgggctccgagcgggctgccggggcgcgcgccgcactgaacaatgccgaggagaaggcccgggcctgggccctggccaccgaggacccgaaggtgcccaatgccacgcacctgcggatctgcgcggccttcgtccagtacggccaggaggaactgctggccccctatgttgaccgctacctgcaggtctgcgaactgatctcggcccaacagggcatctgggcaacccagggccatgcggccagccaggccgtgctcacctacctgtggccctcgccgctcgccgaccgcgccttcatcgaacgcgtcgacaagtgggtcgaatccagtgagctgtcggaatcggtgcgccatgtgatcaccgaacgccgcgacgccagcctgcgggccatcgccgcccaggagttcgcggccagccagctgggctgatcgcccaccaccgcacgactgccacgaacacgactgccacgaagcggaagcgtcacgacgctgaaagcgatcgccccggggcgatcgctttcagcacgatgcacgcagggaccaatcacctcgggcgatggcatgatggattggacgcggagagatcaccctccgcccatgcgaccatgcactcgtcgaggagataacggatgacgcagacagcccccagcagtcagaccaaggccaacatcggcgtcgtcgggatggcggtgatgggttccaacctcgcccgcaacctggcccaccacgactacacggtggcggtgttcaaccgcacctacgcgcgcacgcagaagctcatcgccgagcacggcaacgagggctcgttcattcccagcgagaagatcgaggacttcgtgaactcgatcgccacgccccgctcgatcatcctcatggtgaaggccggcgcaccgactgacgcaacgatcgatgagctgctgccactgctgtcgcccggcgacatcatcatggacggcggcaactcctatttcggcgacacgatccgtcgcgagaaggccatcgccgccaagggcttccacttcgtgggagccggcatctcgggcggtgagaccggcgccctggagggcccgtcgatcatgcccggcggaagccccgagagctacaagatcctcggcccgatgctcgagacgatctcggcccactaccacggtgatccgtgttgcgcctggatgggccccaatggggccgggcacttcgtgaagatgatccacaacggcatcgaatactccgacatgcaggtgatcggcgaggcctacgagctgctgcgcggcgtcggcctgaccaatgcggagtgcgccgacgtgttcgccgaatggaacaagggcgacctggacagctatctgatcgagatcacctccatcgtgctgcgccagaaggatccccgcaccggtgccgacctgatcgacgtgatcaaggaccgcgcccagatgaagggaaccggcacctggaccgtgcagacggccctcgagctgggcgtgcccaccaatgggatcgccgaggcggtgttcgcacgcgccgaatcaagtcacgacgacctgcgtgccgccgcgcgcaagtacctggccggccccgacggaaccgtgtcggtggatgatcgcaccgccttcatcgaggacgtccgcaaggccctgtggtgctccaaggtggtcagctatgcgcagggcttcgacgagatccgcaccggcgggcaggaatacgactggaacatcaacgtggccgaggccgccaagatctggcgggccggctgcatcatccgggcgaagctgctggagcgcatccgccaggcctacaccgacgatcccgacctggtgtcgttgatggccgcatcctcggtgtccgcggagatggaggcgaaccagtcggcatggcgccgggtggtgagcaaggcggccgagtcgggtgtgccggccccggtgttcagcgcgacgctggcctactacgacatggcacgtgccccccgcgtcaatgccgccctgacccaggcgatgcgcgattacttcggctcacacacctacgagcgcgttgacgaccacggccacttccacatcgaatggaccggtgaccacagcgagacccgcatcgactgagcacccagtcgaccgagcattccgggatcgcccacccgccaccacaccccctgcggcgggtgggcgatcacctcatccggtcggcgagatgcacggcatgatttccacccatcgggtacaacttgctgtgtgaccaagattgcactcgccattgcagggtccgaggcctccggcggagccggcgcccagactgacatcaagaccttcgagcagctcggcgtcttcggcgccacctcgctgacctgtatcgtctcgttcgatccgaacaacgactggggacaccgcttcgtgccggtggacccccaggtgatccatgaccagatcgaggccgccgtggccgtgcacgggcacatcgacgccgtgaagatcggcatgctgggcacccccacgacgatcaacgtggtggccgaggcgctcaaggaatatgacttcgaccaggtgatcgtcgaccccgtactcatctgcaagggccaggaggccggcgccgcgctcgacaccgacaatgcgctgcgcgcccaggtcatgcccttcgcgacgatgacgacgcccaacctgttcgagacccagatcctgtcgggcatggacgagatcaccaatgtctcgcagctgaaggatgctgccaagcgcatccacgaccagggcgtaccgaatgtgctggccaaggccggcaccttgtttgacaccggcaccgcgctggacgtgttctatgacggctccacgctcgaggtgctcgaggtgcccgcgatcggcgaggagagggtttccggggccggctgcacactcgccgccgccgtgaccgccgagatcgccaagggtgccaccccgctggatgccgcccgcacggccaagcaggtggtcgtgtcgtccatcgaacaccgcatgcacggcaatgcgccgttcgattgcgtgttccagggctactaccgcgagccggcgctggccaccaactgacaacaggcaactgacaacaggcaggggcgggcaatcaccaggtggtggttgcccgcccctcccgactcacgatcgtgtcgaacagggcccggggcacgcggccgacgggctggaatcctgcccccgtgcacggtccggcgttcgacctaggcgccgtcccccggggtcggcagatatgacctcagctgctcgcgcacgtccgcaggtaggggctcggggcgtccgttcgccccggcatgcaccagcacggtgcgggcccgcacatgggcggtgcggtcgtcgggatcgatgatggcgcagcccaaggtcgtcgagctcgcccccacgcgcagcaccccggtccgcatgagatagggcgaggactgccaccgcagctgatggcggtattcggtgtcctggcgcgcgaccacccaactgcccggcagccgctgggccgcatcgaccatgcccgcccgggccatctggggggccattgccgtcgtggcctcgacgcgtgcctcctgcagccagtcgagcgtgcgcacattgttgacgtgcccgtagcggtcctggtcgctccaccgcggttggaaggccgtctccacggcatgctcgtcgagcctcatcgcgggcagtgggctccagggctcatcgggggccgagatggtggccagggcgtcccgctcgccggcggtgagcttgcgcacccgctggtgcgggaagtcgaaggggcacatggaggtggccgcccgcacgcacaattcgccgcgctgcaccatccggtagctcatgatgaaccgggcggcaccgatgctggtggtgctcaattcgacctcgaccggaccgccgtccagcatcatcggccgcaggaactccgagcgctggttgaccaccacgctgccgtgcagcagcagctcgggatgcgagccgccggccatgaagcgcgcccgggcctcctgcgccaggtcgagcacaaccacattgttcacatggccctgtggatccaggtcggaccagcgcagcgggatcgtggcatggaaggaggccatggacgctacttgccgccggtgaagggcgtcaggtcggacaccgtggtctgttcgtacaagtcgtcgatcgtcttctcgtagcgcgccagcaccaccggacgcttcaccttcatgctcggcgtcagctcgccggtgtcctgggcgaactcgtggtcgaggatcgcatagcgcttgacggtctcccaacggtcgagccgctcattcgccttgcgcacgaacttgtcgatcgactcgcggatctcgggaagctggctcagcgtcgcatagtcatcgttgggatggccatggttcttgccccagcgcatcaactggtcgtgatccatcgtcaccagggcgatcacatagggatgcccgtcggcgactgcgacggcctgcgagatgtagggcacattggccagcagggccgcctcgaccttctgcggcgccacgtacttgccgttggaggtcttcatgaggtccttcttgcgatcggtgatcgtcagatagccgtcctcatcgaagtggccgatatcgccggtgtggaaccagccgtcctcgaaggcttcggcggtctcctcgggcaggtggtaatagccatccgccacgatgggaccgctgagcagcaactcgccgtcggcggcgatcctggcgtcgatgccgggcgtgaccgggcccaccgtgccgaacttcggcttgtcgggcaggttcaccgccgcgatggccgcggtctcggtgagcccatagccctcgagcaccagcaggccggccgagtagaaccaggtctgcacctgggtggacaacttggcggaccccgagatcatgaagcggatcgatccgcccagggtgtcgcgcagcttgctgaacaccagcctgtcggccaccgcatagcgcaggcgtgccggccagggtgcgtgcttgccggccaaccggtagggacgcgattcgcggcccaccgcgaaggcccagcgcgcgatgcggccctggatgccgttcgccgggctctgggtgatcaccgccgaccggatcttctcgtagatgcgcggcactccgaccatgatcgtgggatgggtctcccccatcccctccacgatgcggtcgatgcgcccgtccaccggcatgatgaagccgatggccatctgggcggccagcaggtcgcgtccgtagacatgcgacaggggcagccacaggtagaccacgtcgcggtcgtcgatgatgccgcgccacatgtggtgcatggcctcgccctgataggtccaggcccggtgcgggatgcggacgcccttgggtcgtccggtcgtgcccgaggtgtacaccagggtggccagggtctcgggttccatcaggtcgagccgctcgtcgagcgccgtgggatgggccgccaggtagtcacggccgagcgcgtggagcgcatcccaggtgaccacccgatcgccgccggcgtcggcccggtcgatggggcgatcatcgtcgaacagcacgatgtggtgcacctgcgcattgagctctgactggtcaaccaccttctggagttgcttccagttctcggccaccacgatgaccgattcggagtcctgcaggatgaacagttcgtcatcgggctggctgttcgggtagacggtcgtcgtggccgcggcggcgcaagcgatgcccaggtcggccagcacccattcgatcctggtcatcgcggcgaacgccacccgctgctcgggctgtacgcccagcgcaatgaagcctgcggcgatctggtcgacctcgtcggcaacctgcgaccaggtgaggtccttccagacctccggctcctggtgctgcggcacccggtaggccaccgcatggggggcccgggccacccgtgcacggaaggaagccggatagctgggtgggcaggcgctgaggatctcctcgcgaacgctgttcatcacttcacctttcgaggcccgacagaccccttgatcctatcggcgcatcaggggagccgcaccagtgccgacgtggcccgcgccgctcgtggtcactggctcacccctgcgtgaacgcgcgacgatacggccacgatccccgccgggctcccttagactgctcccatgtccggtgccaccaaccccccatggctcaccgccgaccagcagcggatctggcgcagctgcctggccggtgtcgcacgcatcgacagccacctgaacctcgcgctcgcagaattcggcctcgacctgaatgagtacgagatcctcgtgaccctgtcggagtccgacaaccacagtctgcgcatgtccgacctggcgcaacgcgtctaccagtcgcgctcacgcctcacccacaccgccaagcggatggagaatcagggcctgctgcgccgcgaacgtgccaatgacgaccgccgtggcgtagtcgccagcctcaccgacgagggcatggcgctgctcgtcgaggcggcccccacgcacgtgcgttcggtgcgcgacatcctcatcgacgtggccacgcccgacgatctgcgggcgctcggacgcgtcatgggggcggtgctcgaagtggcagactgaggcgcgtgagtgcatcagtccagtccatccccgttaacgagctgtctgaccgcgtcgacgcgctgcgccgtgagttgggcagtgatgactgccttgacacctccacactgacccgggccctctattcgaccgacgcgtcggtctaccgcgtggtgccgacggtcgtggcgaccccggccgacaccgaccagctgcgccatgtggtgcaggccgccctggcggtgggcctgcccatcaccggccgtggcgccggcaccagctgtgccggcaatgccgtgggcaccggcatcgtcgtcgacatgcgccgccacctgaacaagatcctgtcgatcgatcccgatgcccgcacggcaacggtgcagcccggcgtggtgcaggacgtgctgcagcaggcggtgcgccccttcggactgcgcttcggccccgacccctccaccagcagccgctgcaccatcggaggcatgatcggcaacaacgcctgcggtccgcgcgcactgggctatgggcgcagcgccgacaacacgatctcgctggacgtgatcaccggcgccggacaggagctgagggtcgggcccggggagtccaatgacttcccccagctcaatgagctcgtggaatcgaacctgggcatgatccgcaccgaatgtggccgcttcacccgtcaggtgtcgggctactccatggagcacctgctgcccgagaacggccgcgatgtcgcccggttcctgtcgggcaccgagggcacgctggccatcatgacgcaggcaaccgtgcgcctggtcgccgatgccccgcacaagatcatggtcgccctgggctatccgacgatggtggatgccggcgcggccaccccgaagatcctggagttcaagcccaccgccgtcgagggcatggacagccgcctcgccgacctggtggccacccgactgggcccctcggcggtgccgccgctgccccgcggcgagggctgggcgttcgtggagatggtcggcgacgacccggccgagttggccgacaaggcgcagcgcctcacccgcgagagcgattgcctcgagggatcggtgatcgacgatcccgcccaggcccagcgcctgtggggcatccgctccgatgccgccggactggccggcgtcgccctgaagaatccggcctatgccggctgggaggattcggcggttccgccggcccagttgggttcctacctggccgatttcgagaagctgctcgaggagcacaacctgcacggcctgccctacggtcacttcggcgatggctgcctgcactgtcgcatcgacttccccttcgaccagcccggtggcaccgaccgctaccacgacttcatgatcgccgccggcaagctggtggccagccatggcggctccatgtcgggtgagcacggcgacggccgggcgcgcagcgagctcctgccgctcatgtactccggcgacatgatcaagctgttcggccaggtgaagaacctgttcgacccgaagaacctgctcaaccccggtgtcatcgtcgacccgcgccccaccgacgtggacgtacgggtggccgagaccatcaacgcgcccctgcgactgtccgatccgctgttcacccgccacgtgcaccagtgcaccggcgtgggcaagtgcctggccaattcgaccaaggccggcggcgtgatgtgcccgagctaccaggccaccggcaacgagcgcgactccacgcgcggacgctcccatgtgctgcaggagatgatcaacggccggctcatcacaggcggttggcgcgcccccgaggtggccgaggcactggacttctgcctggcctgcaagggctgccgtcgggagtgccccaccggcattgacatggccgcctacaagtcgcgggtgctgtacgagaagttcaagcaccacctgcgcccgatgtcgcactacgccatgggccacctgcccacctggggacgcctggtcaccaagctgcatgtgggggcactgggcaatctgttcacccagacgccgggactgcgccacgtggtgcgggcgatggcgggggtcgaccagcgtcgcccgatgccgaagttccgcaagggcgcctcggcccgcaaggatgccgcccgcgagatcgcgcgtcgcgagccgcagggcaagccggtcgccatctgggccgactccttctccgacgccttcgagggcaaccagctgctcggactggtggccaccctgatctcggcgggctatgcgccccggatgatcgaacaggatgcctgctgcggactcacctggatcaccaccggccagctcgatggcgcgaaggcccatctgcgcaaggccctcgatgtgctctatccgatcgcgaaggccggcacgcccatcgttggcatggagcccagctgcatggccgtctggcgctccgacgccggtgagctgttggagggcgatgaacgcgtcgcggaggtggcacatgccacccacaccctggccgaactgctgggcaagaccgaaggatggaatcccccggacctgtcgggccacacgatcgtcgcccagccgcactgccaccagtcgtcggtgctcggttgggctgccgaccagaagctgctggaacgcaccggcgccaaggtggtcaccctgggtggttgctgcgggctggccggcaacttcggtgtggagaagggccattacgaggtgagcatcaaggttgcggagcacgatctgctcccggccatcgacgccgccggtcccgatgccatcctgctggccgacggcttcagctgccgcaagcagatcaacgacctgcggcagcgtcaggcgctgacgctgggtgaattgatcgccgcgcacctgtaggtcgaccagatccgatcaacaacaagggcccgtgtcgtcgcattgacggcacgggcccccttgtctatcccctgcgtttccgctcgtcgcgccgccggggtgcgcagccacgacgccgagtcagccgcgggtgtggcgggccagcaggtacttcacgtcggggtcggcaccgcggaaggtgcggtagtcggccatcacgtcgacggagccaccgggggccaacacctcgcggcggaagcgctcacccgctgcgcggtcgagtccgccgtgctcgtcgaaccaggcgctggcgtcggcatcgaagacctctgcccacaggtaggcgtagtaggcgccgtcgtagccggtggtccagatgtggctgaaatagcgcgtccggtaacgcggcggcaccagcacgaaggccacgcggcgttcctcgagggcctcgttctcgaaggcatccacctgtccgggttgggtgggcagttgctcgggcgaggagctgtgccaggcctggtcgagctgcatcgccgcgacgagctccaggtcgtcgaagccgacattgccctgatcggtgttgaccagggcccccacgagatcggagggcaggggctcaccggtgcgccaatgacgcgcatagtgggcgagcagttcgggatcgcgggcccagcgctcgttgacctggctggggaattcgacgtagtcgatcggggtattggtgcccgccagcgacggatagcggctgtcagcgaacaacccgtggaggcagtggccgaactcgtggaagcaggtgatcacctggtcccagctcagcagggcgggctgcccggcgcgcggacgggtgatgttggtgttgagcgtgaccacgggcttcgcgccggtgagtgagttggcgttcaccaggtcggtcatccacgccccaccctgcttgctcgggcgtgcccaggggtccaggagcagcagccccagcacggtgccgtcctgttcgtgcacctcgtagacgcgcacatcgggggtgtacccggtgagtccctcccgacgctccacggtgatgccgtagaggcggtgcgcagcctcgaagaccccgcgggtgagcacctgctcgaactccaggtagggacgcagggcctcgtcgtcgagctccgcgcgggcacgctcacgcgatgcgacccacgaccagtcccaggggccgaattccttgccgacggccaggtcggtgaagatctcgcggaagcgcagcgaatcctcgctggcctggtgtaccgacagcttcgagaagggatcgagcaggccgcggatggcgtccaccgtcttcgcgcagccaccatcgtccacataggcggcgtggctggcgtagccgagcagggcggcccggtcggcgcgcacccgggccagctgcaccacgaggctgccggtctcattgccgccggtggcaccccgcgacatggacgcctcgaagacccggcgccgcacttcctggtgcgacagggaggccaaccagtcctggccggtggtgttcaccagctcgagcagccagccgtccaggtcgcgggcgccggcggcgcgttcggcctcggtgcgctgttcctcgctcagcccggcgagttccgcaggatcggtgatgtgcacggccgcctcgttgcggccggccacgacgcgctggccgaactgtgattcaagcctggcgatgcgggcgttgagcacgcgcagccgttcctggtcctccggcgacagggcgacgccggagcgtcggaaatcgcgcaggcgctcgtggagccaccaggtgacctgttcgtcgcccggctcggcgccggcctccaccgcctgcgacagatcgcgtacccggtcgtagagcccggcatcgagcatgatcgcgtcgtggtgggccgccagctcgctggacaggcgctcggccacggcatccagctccgggctggtgtcggcgtcgtgcagcgtgaagaacgccgccgtggcacgtgacagcgcgagctccgcacgttcccaggcctcgatcgtgttggcgacggtcgccggctcggggttgtcggagacaaggcgcaggccggacagttcggcggccattgcgtcatgcacgatctgctcgtagtcaccgggcgccagggcggcgaagtcggcaagctcgaactcggactggaggggtagcgaagaactcaccgttcaatcaaacacccccgggcgggccagcaacagccccgtctagactgtcggccatgccgacgctgggcctgaccgaagccatccgaacaatgccagacggcaccgtcaagcaggtgaatccgctgtcgggggtggaggtgtggaccgtgccgggccgcggcaaccgtccgctggcgaccccggtgaatgaccccagggcgctgagcgccgacgatttcgggcacagttgcgcgttctgcgccgaccgcatggccgagaccccgcccgagaaggcgcgccgtgtgcatggcgctgacggctggcagacgctcaccggtgtgttgcccgaacacctgcacgacacggtggccgagttccggcgcatcccgaacctgttcgagatcgtcggctacccctattgggtggccaactacgactacaagccctccccggcggccatggcccgctatcgcgcctaccgcaatgacgccggcgggcgggagcacctgctggccatcagccgcacgaagctggcggcctccgggctcgcaccggcccaggtgagggccacccccgatgacgagctgctggatgacgccatcggcttcttcgccggcgggcacgacgtgatcgtggcgcgacgccatttcgtggacggcgccaccgacagctcgcagctggcgggctccggtgccctgtcccccgacgaacatgccgagtacatgcgcttcaccgtggacacgttggccgacctgtaccggcagaatcgctacgcccgctatgtggcggtcttccagaactggctgcggccggcaggggcgtcgttcgatcacctgcacaagcaactggtcgcgatcgaccagcacggcacccaggcggccggcgaggtggagcggctgcgcagcaatccgaatatctacaacgacctgctgctgggcaccgccgtgcagcacaacctggtgatcgccgagaacgacagtgcgatcgtcttcgccgggttcgggcaccgctatccgaccctggagatctattcgaagtcggcaacctgcgagccctggaaccagtccgacaaggaactcgacgacatgtcggcgctggtccatgcgtgccacgcggccaccgggatggatgttccgtccaatgaggaatggcaccaccgcgcccccgacatggacgtgcccatgccatggcgcatcaacctgaagtggcgggtgtccaccctggccgggttcgagggcggcacgaagatctacctcaacacgattgatccctggcatctgcgcgaccgggtggtgccgcgcctgcacgcgctgcgccgccaggggcggctcgccgacaacatcctgctcgacatcgaatgcccggcccagtacaactcgctgatgtacaaccccctgctgcagcgccgggacacgaaccgcgaccggccgatcaggattcgttgaccgggcgtgcgcgacgcgcgaccgtgtcgaccctgatctcctggccctcggtgaaccgcgccgcgtccggatagcccagcaacagcgcaatgccgcgttggcgagcgatgatggccccgtggccggtgtcaccgccccgcagggtgatgatggcccggcagcgtgcggtgtcggcggtcgcggcgctcagcgcgtccagttcgggcaacacccagactcccgctggtgcctcccggggccagcgcagcgaggcccccacgattgccgagcgcagcaggcggtcgagtgagcgcacgtcctggccacgctcgcgcagataggggtcgctgagcttgtcaaagctggcgctgagtccggccatcgtcgcggagaccgcctcgatgctgctggctcccttatcgatggcggagctgacgcccgtgcgcagcgacgcatcgttgagcagtgccttctgggcgttgaagattgcggcgaaggggccgctggcctgatcatcgagatagccggccacatggtggtgcgcctggtcgaagcgggcctgttcgatggcggcgctgccggcccggtagccggcgacatccggatcgggatcgatgatgtgcacgggcccctcgaccaccgcggtggccacgggggcggggctggcatcctgctgaggtcgttccccctccgacgcgcgaccgggggtgttgcctgcctcggacgggttgccgttggtggcgtcaccgaactgccgggcggcgagctcgtcgagggcttggcgcgcctgtggggctgccgcccccgacgcctcaacgtgcatcacctggccctggtgcagttgcagggccgccagggatgagacgctgcgggcatcggccgggccggcaccgctggtggcattcgagatgacgacccgcgcatcaaggccgctcagtgccgagaccacggcggcggcgggtcgggcgtgcaggccgtggacgttggtcatcgtgtagtcccagacgagccggtgtccatccgcttgggtcgggcccccggcgcccactgcgacggccggggtggagtccttggacggcaatccgtccgcggagggggccgtgtcccgggacggcgattcgtcggcgagctgctcgatcttcgcgttcagcgacgagcgtgcctcggcatcgacacgggtgatcggggctcccccggcggcggtgaccacgccggccacgagtccctccaccatgggtgccggtgagatcaccacgcgggcggcgaggtcgggatcgacgaactcgagggccatctgggcgctcagcagggccgatccgaggtcgacgaagaccagcaccccgtcggccccggccagctcttcgagggcggcggagaccgctgtcgcatcggtgcccagcgagccgtcgtccaggcccgccgcgatccggatgggtggccgctggtcgggcggcaccatctgcaccgccaactccaccgctgcctgtgccagcgggcggctgtgggacacgacgagcagtgcgatcatcctggcctccggtcagctcagcgtgcgtgctgcggattcaatgagcatcgtgaggcttgcggctcccgggtcgagatggcccttgctgcgctcccccaggtacgacgcacgcccgcgtcgggccaccaggtcaacggtcgcatcgcgtccctgctgggcggcggtcgaggcatgcttcagggcattggccagcttgtcccccgcggcggcgtcagcttcgaggcgctcgactgccggcgccagcgcgtcaaccatcgtcttgtcacccactgccgacttgccgcgctgggtgacgccctcgagcccggcccgcagcgccttcgcgaaggtggccgtggtcagggcggtgtcggtgggaagcgcggtggccatgcgcaggaagagcgtgccgtagagcggcccggccgcaccaccgacggtgctgaccagcgtcatgccgaccttcttgaggtaggcgccggggtcggcgaattgcgccggatcgagtgcggcaatggccttgacgccgcgttccatgttgaagccgtggtcggcgtcaccgatctcgcggtcgaggtcggtcagttcctgggagtgctcggtgatcgtgtcggcatagtcgtgcagccaggccgccactttcgtcacgcgttcgtcgcccatcagattccccacctcagtcccggcgtgttcaccggcgcatcccacaatttcaccagatcgtcatcggccctgagcagggtcagggagcaacccgccatgtccagcgaggtgatgtagttgccgaccaggttgcgcgccacggtgatgccgcgggctgccaacaggggttcgatctcgccgtacatcaggtagagctcgatgagcggcgtggcgcccatcccgttgaccatggcgatgaccggcccggtgaagtcgaggtctgccagcacggggtccacgagttctgcggcgatctgggcggcggtgcccatcttgacccgcttgcggccgggctcgccgtggatgccgatgcccagttccatctcgtcgtcggcaagttcgaagctcggcttgccggcggcgggcaccgtgcacggcgtgagggcgcaaccgtaggagcgtccggtggcgatgaccttctcgctgagctgcttgatcgatgcgaggtcgcgtccctcctcggcggcggcgccggcgatcttctcgagcagcaccgtgagtccgacgccacgtcgcccggcggtgtacagggagtcctcgacggccacatcatcattgacgatcaccgactcgacgtcgatgccatcggcctggctcagctcggaggccatgtcgaagttcatcacgtcgccggtgtagttcttgacgatctgcagcacaccggcaccgttgtcgacctgcttggtggcggccaccatctgatcgggtaccggggaggtgaagacctcgccgcaacaggcggcgtcgagcatgccctccccgacgtagccggagtgcaggggctcgtggcccgagccgccgccggagatcaccgccaccctgccggcctgcttgggttgggcacggtagacgatcttgttgtccaggtcgacgcgttgcactcccgggtgcgctgcggcgactcccctcagggagtcggccaccacgtgctcggcatcattgatgagctttttcatggcgccagtctctcagtgttgcggggacccaacaagggttggggtcgctttgcggacgcggcgcgatccccggcgggggttgggcgcaacgacggctgggcgggtgccacagatgtgcacccgcccagccgtctgtcatcggcacggaagcgatccggccggtggtgttgctcagtcgcgtgtcaggcgacggtagcgactcgcgtggggacgcgaggcctcctcgccaaggcgggcgaccttgttcgtctcgtagtcggcgaagttgccctcgaaccagaaccactgcgggtcattgccgtcctcgccctcgccctcccaggcgaggatgtgggtggcgacgcggtcaaggaaccagcgatcgtggctgatcaccacggcacagcccgggaattccaacagtgcgtcctcaaggctctgcagcgtttcgacgtcgaggtcgttggtgggctcatcgagcaggagcatgttgccgccctgcttgagcgtcagcgccaggttgagtcggttgcgttcgccgccggacagcacgccggagggcttctgctggtcgggccccttgaagccgaaggcagccacgtaggcgcggctcggcacctcgaagttgccgaccttgatgtagtccaggccgtccgagacgacttcccagacgttcttctcggggtcgatgcccgagcggttctggtcgacatagctgatctcgacggtcttgccgaccttcagctcgccgctgtcgggggtctcctccccgacgatcatcttgaacagcgtcgacttaccgacaccgttcggcccgatcacgccgacgatgccggcgcgcggcaggtcgaagctcaggccgttgaacaggatccggccatcgaagcccttgtgcagcttgttggcgtcgagcacctcggcgccaaggcgcttgcccggcgggatgttgatctcaccggtatcgagcttgcgcgagcgctccgcctcggcggccagttcctcgtagcgggccaggcgggccttgttcttggcctggcgggccttggggctggagcggacccattcgagttccttctccaggatcttggcgcgcttggcgtccttctggccctcgatctgcaggcgcttgcgcttggtctccaggtaggtggagtagttgccctcgtaggggaagagccgaccgcggtcgacctcgcagatccaggtgaccacattgtccaggaagtagcggtcgtgcgtcacgcacagcaccgcacccggataggccttcaggtgggcttccaaccagttcaccgactcggcgtcgaggtggttggtgggctcatcgaggagcagcaggtcgggctgctcgagcagcagcttgcacagggcgacgcggcggcgttcgccacccgacagcacgttcaccggagtatcgggcggcgggcactgcagtgcgtccatggcctgctgcagctgggaatcaatgtcccaggcgttgcgggcatccagctgctcctgcagttcgcccatctcgggcagcagcgcgtcgtagtcggcgtcggggttggccatctccgccgagatctcgttgaagcggttgagcattcccttgaggtcggcgacggcttcctcgacgttctcgagtaccgtcttgtcctcggtcagcgggggctcctgctgcagcagccccaccgtggcgtccttggcgagatatgcctcgccgttgttgatgggttccaggccggccatcaccttgagaagcgtggactttccagccccgttgggacccacgacgccgatcttggcgtccggatagaacgacagtgtcacgccgtcgaggatgaccttctcgccaacggtcttcctgacgtcgtgcatctggtagatgaattcagccatatgggcctgtggttccttcgcttgcgatgtgtggagtaggtgcggccgagtgcccgacgcgcacgttccgcaccggcgcgcaggcatggccaacacgcacgggagaggaaagaacgcggtcagatgtcggcgccgcgtggtcaagtatgccagcgccgacacatgcggtcacctcgcgcggcccaaccgcgggggctcaggcagccggctcggccacgccgtcctccaccgaggcgagtgattccgcgggcaacgactcagcttcgtcgtcggccccacaacgttccccgtccggtcgggactccagtgccggaccggagtcggcgcggggctcggcgggcaccatccgttcattgcgcgtgaatcggctggtgcccctggcgaggtcgtggcccacggacttggcctcaagcaccagtcgctcgtgctgctggccgtcctggccgacccaccgacgggccctcagcctgccgacgaccaccaccgcctcgcccttgtgcacgctggcccgcacgttctccgccgtgcggttcaccgcctgcaccgtggtccacacggtctcgccatcggtccattcgccgccccgtcggatccgtggcgtcgcggccaacctgaaggaggcgaaggaatagccctcgccggaggtgtagtcgacctcggtgccaacatttccggccatgctgattgcggtgtccatggtgattccccattccgggtgccgcgcaccctcggttgtcccccggcgccgcaggatcgcgacgtcggatataccgcagtgtgggctgattgccggaaacatcccggggccaaccgggcctgtggatgcgtttcggcgcgcttcaggaatcagtggacaaggcccgggaactcccggaaatgggggtggcggctgctaggccgtggccgggcggcgctactgcgacaggacgtcgatgaagccgtcggccagttcgaacaggctgcgctgcaccgcgaggctggcgcgccagtcgtcgggaacctccagcgaatggttggccccggccacgtcgacccagctggtgcccagttcgtcgagttcgccctcgatgtcgcccgcgcggccgatgtgcaccgtgcgcaccgagtcatcggggccccagtggggatcgatgctgcctccggcgatcagtgacggaccgtggtattccagcagcgccgcgcgcacctcctccacgtcgagcagtggggtgagccagatgccgcaccagccgttggcgctggccgtggacgctgcccgtgaacccatcgacttggcgaccaccatcgtctggtcggcatccggggcgtcatggtcgagcagttcgagggcgcgggcgatgatctcgtcctggttcgtctgcggcgtcaggtcccactgggcctgctgcacccaccagccgtgttggtgggcgatggtgctggtccagttcagcaggggccggtcgcacgaatagcggacccccggaatcaccagcatgcgcctggccacgtggcgaggcacctcgtcggtgcgccggaaaggcaccgtccggagggtctccagtgcgccgattcccagatccacattcccgctcattgctctcccttcgcggtcgcgacggcctgccgcgcctgctcatagcgttcaagttcactttccaccggcgcgatgactgccacatcggtgacgcgcgccaccgccagcatcagtgcctcctgcgcgtcggcactgcggtgtcgggcaccgacctcgaccccgaggcgggccagaccggccaccacgatcccgccgagtgcgctgcccaccatcagcagcaccggcacgggcatccgacgccaccgcggcaccggcaacaggtcgccgccgagcagcgcgttgatgatcatccagccggcccccaccaccaacacggcgaacaggagccattggacgatccgcaccacaccccaccaacgccgtccgcgacccatcgccagcccggtggtggcgaccgcatggtccagggcgtcggccaggccgtcggcatgggacaccgacgccgcacgcacggcggtggcccagcccgcgggcaggccccgtgaggcatcgtcggacagggcccgcacggccctggagacctgcgccgcctgcactccccccgaggcgccggtcagggccgtgcgctgcacctgggcgggtgggttggcctgctggccagtgcccctgccccgcagggccggcaggtcgaggtgcaggcgtcgcaacggatcgggacggaacctccccagccagctcagcaccggccaaccggtggccagtgatccccggtgtcgcgacgacaccaggacggcacgggtgaccaggggaatcccggcggcctgcgccagcgcctggtcgagcgcgtcaaggcgttcgcggggaagcctcatcgtggcgggctccccgagctggcccgccagcgcgaccgcggcctggtcgatgtcggtggcgaggcgttcggtcaccaccttgcggtcgcggaccgcccgggcaatgcggcgcctcaggtcgtcgacccccaggccggacatcgccgaggtgaccatgagcggcgtactgcccagcccatcggcatccaccaggcgacgcaggtcgccactggctgcccgcagctcctcgggcgtcaggcgatcggcctggttcaacacgacggtcatcacaccggcatgggccgccaacggggccaggtagcgctcgtgaagggcggcgtcggcgtatttctgcgggtcgaccacccagatgaacatgtcgacgagcccgagcaggcgctccacctcgacgcggtgccgggcagaggtggagtcgaagtcgggaaggtccagcagcacgaggccggacagttcgggacggccccggcccagtggcctgcggacgggcacattcagccagtccaacaactcggcgggttcggtgtctccccaccaggccgccagagtgcggtccgtggtgggccgacggacgcccgcggtggcgatctgtgccccggccagtccgttgaacaggctcgacttgcccgagccggtggccccggccaatgccaccacggtgtattcgccgcccaggccgagccgctcatcggcccgctgcgcggcctgcagcgccgcgtccaccagcgcgtcgtcgacgcgcccgcggcacaggtccgctgcctgcgacagggcggtgatgcgctcgccgagcgggacctgccccgacttctggcgccgtccgaagatcattgctggcctgcctcgtcgtcccttgccgtgtcatcgcgtgccgtgtcatcgcgtgccgtgtcatctcgtggcgcgccggcggcattcatggcctgcatctgcgactgcgcatttccagcgctggcggcatcggccccggcagccgcgtgccgcagcgccccggccagttcggggccgatgcccagccggcgcagggcgtcggtgaagcgcacgagttcgctggccatcaggccctgcacccgggcatcgagggactccttggcggttgcggcgagccgacgcaccgcgtcgtcgccgaagatggattccagcaggcgttgggccaccacggcactgccaccggccacgcccacctcggccccggtgagtccggcggtgtgggcaaagatcaccagcatcagcgcggcccccacgccgttgacgccggccgcggcgatgcgggccgtgcggcgacggccgtggccctgttcgcgcaccagctccagcacctcgccctgccagtcgcgcacctcgacacccacccgggcggcgaagtcggcggaggtgtggcccagctgtgggtcttcggccagcaggggccgacccgccaccgactggcgccaggcggtggcggcctgctccgtggcgtcctcggcagcagcgacgatgagctgctccaagccgctgctggccgcttcggcggcctgttcgccacgtccgggctcaccgcgcagggccctgccgatgcggtcgcgcagtcggcccaccgtgtcatcgatgaagcgggtgatctggccggtgcccacgtactcgtgccagcgggcgagcacctcgccgcgcagcagggtgccgtcggcggactgggccgacaccgcctcggcaccacgcgtgaaggcccccgtggcgtcggcattgagctggttggcggcccggttctgctcgtcgagggcgtcggccacccgggtgctgccgcgcacgatggccccgatcgcaccgcgcagggtttgcgcgatcacctggcggcgccgctgattgttgccggccaacccggcgaggaaatcacgaataggcgtcacgatgtctgccggcagcaggccggaggcgtccagcgtggtctccggcacggggaacaggggtgcgtcagccagcccctgggcgctcatgaggcgggcgaggtcggccgggacctctcgcatcgcctccgggggcacccggtcgcagacaacggccaccgccgccccccgctcggcggcacgggtgagatatgaccatggcacggcgtctgcgtagcgggcggcggaggtgacgaacaaccacaggtcggccgattccaacagctggccggccaatgcccggttgtcggcgaccacggaatcgatgtcgggggcgtccagcagcgcgaggccctgtggcagcgtcggctcgggaaccaattgcagggactgcgccccgacggattcaaccgtggtgcgtactaggccgggcaggatgcggtcatcggtgaaccaggcggcgtcggccgggttgtgcaccaggagtgggctgcgcgtggtgggacggatgaccccggcccgggagaccgtccggccgatcagggagttgaccagcgtggactttccggcgccggtcgagccgccgaccaccgccaggagcggggcgtcgatgttggccagccgcggcagcacatagtcggtgagttgggcggccatcgcagccgcctgccgttcgcggtcgggggcgtcggcaagttcgagcggcaggcgcaccctgccgaggtcggcacggagcctgcccagggactcactgagtgactcatcggcccggtcacgggcgccagccgtggcccggccctcagcgattcccatggtgtgccgattcccctcttccgctcaggacctcgtggccctcttgtgccatcctgcccgcacgcgccatcatccccagcgctgcccggcgcccacgggctggcctgcctgcgggctgggcggcatcaccggggtgccggtgggcggtggtgccaggggcggcgtcgaaccgggactgcggcgcggacgaagccgcgcgatgagacgccccagcgcggcgcggatgttgcgcaacgtccagttggtgggcttgatgtgcaggccgtcggtctcgctgagcccggtgccgcgggcgtcacggatgatggccaacagttcgcgcgagcggagctgtccggcctcgtccacggtgccccaggtgaccgaggcccgcagataggcgagctcgatcatggcgcgctggatgcgcacggtggcgatcagggtacgggggccacgcagcagggcggcgagcagcagcttgacgcgtcggaagaagccgctgaacacatgggggtcgcgggggtccagccaaccctcgcgcacgaagtcggccaggcgctggcccaccaggcggccctccgagcgcaggtggatgaagtagcggatgagcagtccgatcacgccgctggcgccgaagatgagcaggaaggtcatggccgccccggcgtcgtcgccgaagaacaggcttgacccgttgaagagcatgtggagcgtcgccgcgcacagatagccggccaggggtgcgacgacgcgcacccacttgctgcggttgcgcatggcgaaggccactccgatggcggtgcacgtggtgaacagtggatgcccccaccaggtgagcagtccacgctgcaggaacatggcgcgcagggcgctggtggggtcctgcccgtagaccattgcggcggacacataggtcttcaggtaataggtgatgttctcggtggcggcgaacgacatcgccgacaggcccgcgagggtgaccacctggatggcgctcaccaggcgtcgacgcaccaggatcgccagcaggatgagcaccgtcgccttggcgaattcctccacgaagggcgccacgtagatcgcagccttcgtcgaggcggactcgtcgttcgcgctgtcgcccagcagggcggcaacccaactgttgacgaacaccgcgaagtacaccgccacggcgccgccccagaacacgcagatgaccttgagcaggaatccggtgcggtggatgcggtcgatcaggaaatagaggaacagcccgatcgccagcgagatggccgcgagttgggcgcacttgaccacggcctcgttgaactggccgacggtgggttccatgcgctggccggccttttcggtggcctgggcaaccgaggtgatggtctgcacccggaacatcaggtagacccgccacagcaggaagacgcacagcgggaagaagacgaccagcagccaggtggtcgggcggtgcagtgccgaggagaaccagccacgtccgggcactgctggtgccggcaggccgacgagcctgcgctcgcggcgctcaagggccgtcggactcgcaacagccttcggggttgggggtgacgtgggcacgtcgacagcctactggcccacgctttgcgtcaactgtcaggccatgcgcgatcgtgagtggacgattgctgggcggcccgggtgggaatcgaacccacgcgcgacagattagaaggctgctgctctatcccctgagctaccgggcccatgacaagcctaatggtgtggagcgcccgggtcggcgtcggcccgtggtcgcgcccgcggcgggtcgtgcgccggtgacagactgtctacttgtgacgaaacagagatggggccgcacgctgttcgcggtctatggacccactctgatggcgtccatcggattcggggccgtgatcccgctcgtggcaatccaggcccgagcgctgggcgccagcgtcggattggccgccttcatcaccgccctcaatgcactggcccaggtgatgggtgacctgccggcaggcatcgtcgccgaccgcctcggcgagaaatacgccatcgtcgcggcctgcctgatcgacacctgcacgatggcgatggtcttcgtggcgcgctcgctggtcgtcctggccatcgccgtgttcctgcagggcctcaccgcggcggtgttcagccttgcccgccagacctacatcaccgaacgcatcccggtgcactggcgcgcccgtgccatgtcgacgctggggggcgtcttccgcatcggatggttcatcggacccctggcggcggccgcggtgatcacccgctgggacctgatcaccgccttctgcttcgccggggctatgagcttcctggccgctgtcgtgacgttggccatgccgtcacttccgggcgagccgacgggcctgcggggaatccgccagcgccagcaggaggaccatccggctaccttcgacatcctgcggcagcaccgccacgtgctgttgacgctgggcgtcgggtgcctgtgcctgatgctgatccgctcggtgcgccagacgatcatcccgctgtggtgtgaggcgcatggcatctcgccggcggccaccagcctgatctattcgatctcgatgggcttcgacgtgctgctgttcttccccggcggatggatcatggaccgcttcggacgctggttcgtgtcggtgcccacgatcgccgtgatgagcctgtgcctgctggcgctcccactgagccacaccgccggcacgattgcgctggtcgcctgcctgctcggcttcggtaacggcgtgtcgagcggaatcgtcaacacgctgggcgccgacatgtcccccagctatgggcgtccgcagttcctggccggatggcgcgtcttcggcgacggcggcgccgcactgggaccgctgatcgtcagcgccgcgaccgcactggtgagcctgcccttcgcatcgatcctggtgggggcgatcggactggccggcaccggctggctggcccgctatgtgccgcgtgaggtggtgcccgacgaggccgaggtgacggtgggtgccggcggtggcccgggacccgaaccgtcgggtgacgcgtcgacccggggctagagttgtgcgttatgaaagacatgctcgtgtggatcgactgcgaaatgacggggcttgaccttgccaacgacgaactgattgaggttgcctgtctggtcacagacggcgaactcaatgtgcagggcgatggcattgatgtgctcgtccagcccagcaaacacgccctcgaccatatgggtgagttcgtgaccgagatgcacaccaagtcgggtctgctcgcggagctgaagaacgtgaagacgacgatgcgcgaggccgaggagcaggtgctcgcctacatcaagcagtacgtgcccaccgagcgcaaggcgccgctggccggcaacacgatcggcaccgaccgcaccttcctggccaaggacatgcccgaactcgaggcctgggtgcactaccggaacgtggacgtgagctcgatcaaggagctcgccaagcgctggtacccgcgcagctactaccaggctcccgacaagcacggcaaccatcgtgcgctggccgacatccaggaatcgatcgaggagctgaagtacttccgcgccgcgatcatggttcccgagcccggccccacggcgtccgaggcacgtgcgctggcccacaagtaccagggcagcctcaccggattctccgaccccgacgagccgcccgaggccgacttcgccggcgaacccgacaccggttcagcctccaaggactgacccggagggccgccgattttgggtgaccattgaaggtccgctaacatacaacagctgccccacggggtagcgatggtggatgtagctcagctggtagagcccctggttgtggtccaggtggtcgcgagttcaagtctcgtcatccaccccagatgggtcaggtttgaactttcgaccaagggaccacccttggaagatgttccggcttggccctttttgcgtgtcccggttgtctctgccccggtggctgcggcgcgggcctggtcggcccaggtgagagcatcggcctggaggtcggggttcgacagcccgtcgtagggcgtccggtagccgacgtggatgtcgttgtcctcatcaacgtagatcgctttgaacagcgcctggttgcacagacgccggttcgcgtcgtcagcgttggcatagatgtcagcgatattggccaacaacagcagcgagtcatccagattggcccgggcatcggcgtactcgccgttgtgggcccggaccctaaagtcgatggtctccaacgatgcggtgatccggtcctgttcccgtttgagcaggtcgagtgggatcgcgcccgcgtagtgggcctggaggagcttggtctgctcgccttccagttcggtacggcgcgcggcgagttcggccagttcagccgcaccctcgctcatcatctggtcgaacttggcgtgcagcatgcccgagagcgcctgccgggtctcggcgggaatctggatgcgcgtgtaaaagcgctcgatcaagcgctccacgtcgtcgatcagcatcgcctgacgggtgcaggcaccccgtccagcgtggcgggcagagcacacgaagtacgggtagatggtgccctgactggacttggcgttgcagacgatgagacgggaaccgcactgcccgcagaagacactgcccttgaggtagtggtcgtgaacctgggtggcatcggcggcggacgtgtgggcgcccagcacgatctggacctgttcccacacttcgacagggacgatgggatcgtgggcaccacggtgtgacaccctgatacacgatgacgcccttgtagtacgggttcgtcagcatccggtggaccgtggatttggcgattggcttggacgggcgacggggtgtcggcagggtggtcaggccacgggcgacaagttccttgtggagctggctggtggtccagtcccccgacgcgaagacctggaaggcccagcgcaccagcttcgcgcgttcctcatcgacttccacggtacggatctcgcgtcccatgtcgtcgcggatacccacattgcggtacccgatcggagccttcgtgacggtgccaccctgggcggccttctgggacaggcccttgacgacttcggtggcgaggttgcgggaatagaactcggcgattgaggacatgatgccgtgcaggagcatgcctgagggggtctcgtcgatgttctcggtggcggagaccagagtgacgcccgcgtccttgagcgccaggtggatggtgacgtcgtcggcccggttgcgggcgaggcggtcaaccttgtgaacgatgcagtagctggtcttgtgcgtggcgacgtacttgatcatccgcatgagttcgggccggtcggccttgcgggcggactcgcccgcgtcgacgaactcctcgacgatggtcgcaccgagctggtcggccttgcgctggttggcctcacgctgagccgggatcgagaagccctccgcgttgccgcccttttcggcctgctccttggtggagacacgcaggtaggacacggcaatcgcgcccgcgaatggggtgggggcgacaaggctgtcgatggcggcttcgtccgcgtcgtcggatgtcatgactcttctccactgctactggtcccgtgatccggcgcggctcatttcgcggtgggtgttgatcgtgagaagagcccgaaggctataggactaggccgggaaggccacgttgatgttgcctcgccggagcgagacgctaggaccacaacacccgccaccgcgacggacacacatcattctacggcgcgggctgcagcggcgcacttgtcggctcggagcaatttgttgggtggctcgacgtggtcgggccgggctgccggagagcaatacggatgaccagctcgcagagcttgtccaggtccggtggatcattgaagtccgcgcgaatgctgaagtctcgctccccctgcggccgttgtccggtcttcttcgcgtaccggcggcccatcaggatcaccgttctccggtctgatcgtcgatggatgcgtagaacgcgtcctcggcgtcttggcgttgctggacttggtcgaggacgaactggacgaagtcttcgtcgcggttggtgatcggcgtctcgtccatgtgatcagcgggttcttcgccgggccacgtggtttggcgggtggggcggtcgcggtcgagccgggtgccggaggcggtgacccagtcgcgtaggcgctggcgggcgtcggcgaagtcgcggtgccatcccagtggtgcggagccgttctggtcggggtcgtaggcgcacagccagtgcaggtggagggcggagagttcccacaggagttcagggtggtggtgccagtagggcgggatgacggaggccgggagcccgtaggtgtgccgcagccagtcgacccaccggttcagttccaggagttcctgctccaagtcatgggcggtgagcaggttccagttgatcgggtgcggaggttccgggatgtcgacgttggggacaaactgtccctcgtcgggaccctcgtcaatggccttgtcgtgaagctcgtcgttcattgcgcgctccttcacaatcccatggcaggggccgaaggctgtgccgtccgctgtggtggttcgaaggccgcagcatcgcggaccggccgggtgcgcaggctgcgatcaacctcgtagcgtgtgcgggccagatcgtgtccgatccgcgtggcgatgaactcttcaccttcgcgtagctggccgttccgctcgtaggagtactcacggacgtgaccgtcggcgatgatgttgtcgcccttggccagacgttcggcgccctgctcggcagcgccgcggtaagcgatgaggtcatggaacgtggtctccaactgcgtatagctgttgtcctcttcgcggcggtagtgctcgatgccgagcttgagatagagccgggcgtccccgcgctcggtatggctgagctgcgggtcggacgcgacgaagccagacacggactgatgagtgcggatagccatgatggccacctcctggagtcgggcggtcacccggtggtgcccgctgtgccagacaggtgcgccggtgcgtccacagcgtggctactcggtcgtgggcggggtttggaggagggtttcgatgctggcgcggtcggcgtggagttgtggggcgtcggggcgtttcggccaggggtggaggtcggtgatgatgggcggggttgagcgcaggaggatgacgccggtgccgaaggggagggtgcggatgcggtcgggtggcaggatcgggacccggcgaacagatcgttggttggagcgggtgccgtgatctccgagagtgacggagtcggtgtagtcgtcgcgctcaccgatgagggtggcgaggtcttggaggtcgcggctgttggaggcgccaccgaggacgattttgacgatgctggcgtcccagatggccccggcctggttctcattccacttgtcgcgggcttgagcgagggattggaggacgggcatggtcgtgataccggtccccccgccctcggccatcaatgtgggcagggatggcaggggtgcgaggttgccgatctcgtcgagggcgagcaagaggggcgggtcgaggcgagccccggggctgcgggcggcgatgcggcgggcggtttcgacgaggtcttcgacgaaggcggcgaccagggcggcactgttgcccgccccggcaccggtggccagcaggtacagggtgcccttgtcacggatgaaggcttcggggtcgaattgctcatccgcggcggggctgacggcgtcgaggactctggggtcggcgagtgcggccagggcgagggagacgccttgccagatggagtcgcgggcgcgggggtcggcatcgatcatcgcctccagggattctgcccagccggtggccgcgcggggtgtgccggtgaggatcgcgacggcgtcagccgcggcggtggggtccagggtccagcggaacagctcggcgggtgcgcggtggtccagggctgcggcgtggaggagggcctggagggcgacgcgggttttgccttcccagaatccaccgccatccacgccgccgtcggccagtcctgtggctgcggcgagcccgatggcgcggatcatggcggtcagggggtcttcgcagccgcggatgggtgaccagcgcagcccggcggggacaccgtcggcgaggtgctgggggtcgaagacggcgaccggccccagtttctggcgggcccgcagggtggcggtgaggttgtcgggccgggtactggtggtgacgacggcgccgggagcgtcgaggatcgcgggaatgacgatgtgcaggcctttgccggagcggggcgggccgatcaggaggatcgagtcttccactgaggcccatacttgtttgcttctggactggccgagcaggaatccgacgtcacgaggttcagggtcactcagggaggggcgcagtgtggtggcgcggcggatgagctgcttggcggaggcggcggtggcgacttcgtggctggtggcggtcccggccaggtggtgcgggtccacatcgactgcacgcgtgtggcggcgccacagtgtccacgcccaggcacccgccgccccgaggagggcgagcatgagtgccagggtgatccagtaggcgaccgggttgagcccgtcagcgtcgagggcatcgtccggattggcggggtcgaacaggacggccaggcctccggtgatcccggccttcggctgtgcggcgccggtgaggaacgccgcaacggttccggctgcgcggagggtgagcaccaggccgaagagggcggcgagcccggccatgaggatgttcgtcagctcgtcgcccatcgaccctgactggtggggtgtgctcatgggacccgccgcacaaccactcgggccgaggttgtgccgatgaggaggatgtcggcgcccccggcagccagttcgcccaggtccagggtggcgcgggctgtcccggccgcggtggcctcagtggtggtgtgggccagggcgatggtgacgtcttccccgggggtgaacccggccccggtgacctcaatgatgtcgggcgtgtgccggtgccgggcccgccgcggggccccagcagtctcctcgtatgggtgggtgcgtggggtgtgggaggcgtggatgatgtcggtgaatgtgctgccatcagactcgtggacttcgacgcggatggtttgcgtgcgatccagggtgagcgtgtcgaggaggtcagcgaagcgggctttgctccacggcgtcgtgggtgagggtggcgggtactcggcgccgtccagggtgacggcgaggatgccgtaggtgtcgacggtgatgacggccaggggcaggactatcggtgtctgggcggaatcggcggagtgatggtggtggatgctcatgcgcttcaggtgcgccgcgtgctcctggggtcagctgatcatgcgggtggtggtgtcgaagagggcgagttcggcggggtggagggcctggaggtgctggccgcctgggacaccgccgaggccgacggcccggcggtgaccttccagggcccgggagcgaccgtggtgagggcacgctgaggctgtcggcagcccacccggtttggtccgaccacgtggtgtcccttatcttgacgccatgtcgaccacagatcgcgcccccagcagggtgcgactgtgccgtgggatcactgcgggctatctggtcctgatcggcctcgcggtgctgaccccgatcaggcaggaggccatcgccgtcaagcgcatggcgggggtccgattgcagggcgggtcatcgcatccggcgatcgatccggtcgtgctgggcgatgtggtgctcaacatcgtgggattcatcccgctgacgctcttgctgtcgctcggatggccgaaggtcaggccgtatgcgtgggcggggttctgcctgctgatgagcgtggcctgcgaggcgctccagttgattccggccctgaaccgtcgagccgatctcctcaacatcgtcgagaacggatccggggccttcatcggggcgtggctcgccgtccagatccgccgcctcagcgccgggcaggtcctcgcgccggtgccgacggcacagcccgatgcggtacccgtacatcggtgaacaggtcagacaccgcccggttgcaagcgggcatctccagtgccgctgctacacgactgttgcaaacagctcgtactgtgaacccgtgactcccccgcgcgatggtcggctcgaccagcaggcaccccagcagtgggcacccgtgcgcgagaatgccgattgggagtccaccgcaccgatgccgagaagccaggcgacgccggtctacccgtccatgcacaccgatccgagtgcgagttccgaccagcaggacgcaagccagagccaccaggaccagccctcacgccgcaacgtcggcagtggcgcggtcctggcacggatgtgtgcgctgttctacctgctgctgatcggcctggcggtactgatgccggatccggccctgatcgccaagctgaagctcaaggtgggccatctggtccagcggatcgcccaccacatcacccaggtgccggcactgtcggtgggcgacgtcgccagcaacattgcagccttcgtcccggtgacgctgctgctcgcactggcctggaaacgggtcccgctgtggatctggggggtggtgggcacggtgatcagcatcagcgcggagatgctgcagctcctgctgccccagatccaccgccgcccattcttctggaatgtcgtccagaactccttcggagcctggatcggggtggccatcgcggcggtgttcttccagctggcggggctacgctcccgcgaggatctgtgagatctgttgtccccagtgctggggacaacaaaaactaaaccctgggcagccccaaaggccttagatctcagccgatttcccctccacggctgcaatgatctgacccacggcggcctgtatctcagcgagcgcccggtcgtagtcctccggggccccgcggtacggatcgtcgatcaccaggcccggcccggcccggaatcggccacgctgcattccggcgaggtccatcaggatctcaagcctggactcatcatcgagccgcgccggccaattcacctcacccgacccgctgaggaatccacagatcagcgcgaactccctcagcgtgtaggtgcgtcgcagagcagccggcacccgtcccagaatccagctgcgctgatcggtgtccatcgtgagcacgagatcagcaccagagatcagtgcctctgtggcctgccgtgcctcatgcggcccagcagaaaccccagcgcgaccaagggcatccatcatcccctcgccgatgtctgagcccaccacggcgccgacgccggcactggtgaccctcacacccccacggtccagaccggcagccagcaactgcgccgccaccggagagcggcagatattcccggtgcaaacgaccagaatctcgaaggtcatggctccagtatcggggcaatgagctgcgaacagccagatgacgccgcatggcagcttccgcacagccctccagcccccaggactggactcaggcagaccactcgatcttgcgggccagtatctcgacatcaccccagatctgctcagcagccaccctcgcggcctcagagccctgacggtacggatcggcgatccagtcctcctccagaggatcgggccgctgctgtcgcacatccctcaccagatccgacaccctagtcagcgcacgccgcggctgggagcgcaatacagcggcagcctgccccagcgcgaccacccgctctaggtgctccgggtaggacgcggagatccaatccacatgctcagccccgaacaccaacacgatgtcggcatccttgaggatccgcccggtgagctggcgggcacggtgcctcgagccatccagcccgagccgggtcgcctgttgactcatcagctcatcgagcgggtggtcgaccagcgccatcacccccgccgatgcgacctggacaccaggcacccccgacagacgcgaggacaggcacacctggccgaaagctgatcggcagatattgccggtacacacgaacagcacccgcactggccgatcggtcccgtcacggccctgggcgccaccttcgggagcgactcctagctgcccggtcaggctctgggactgcactgtcctgttgtccacctcgccaccttcactcgagtcttccgatcaggccaccatagctggcgcatagcactcatttcccgaagtcacgtgccaccatcaagcgaacctcgacaccgcgatgcggtggctgaacattctcagtattattggctcttcacgatcgagggtgtagtcgcctgagcgtgtcggtggtctggtaggggtcgaggtctccacgaggatggaagttcctgcactgcccatccggaagacctcgacgtgctccacgctaccttcaccgcgccctccctgaccacgttctgccgactcgatgagctcggtcttgaggccgtcgggcagatcgtggagccggatcgtgcggtcatcgagtgtcgcgtcgctgaaccggatcgctggtgtcgcaagtgcggatgcgagggcgtggctcgcgacacggtggcgcgtcggcttgcgcatgaaccgttcgggcatcggccgacgacgttgttgatccgggtgcgtcggtacaagtgctccgggtgcgggcgggtgtggcgccaggacacgtccaaggccgcgccggagcgggcgaagatctctcgcggtgggctggcctgggggttggcgggcctcgtcctcgaccacctctcggtgtcccgcgtcgccgccgggttgggcgtgtcctggtccgcggcgaacagtgcggtcctcgctgaaggggagcggcagctgatcgatgacccggcacggttcgacggggtcaccacgatcggcgtcgacgagcatgtctggcggcacacgaggaagggtgacaagtacgtcacggtgatcatcgacctcaccccgaatcggaacaaaacgggaccggctcggctgctggacatggtcgagggtcgttcgaaggccgtgttcaaggactggctcgcgggccgcccgaaggaatggagcaagcagatcgaggtggtcgcgatggacgggttcaccggcttcaagaccgccgccgccgaagagctccccgccgcggtcccggtcatggatcccttccacgtggtccgcctcgccggcgatggcctggaccggtgccggcaacgggtccagcaggccacgctcgggcatcgaggccgcgccggggacccgctctacaaggctcgccgcacactgcataccggcggtggcctcctcactgacaagcaacgcgatcggctcaccgcgctgttcgccgcggagcaacacgtcgaagtggaagcgacctggggcatctaccagcgcgtcatcgccgcctaccgcgaaccagacaaggacaagggcaagcagatgatgcaagccgtgatcgatgccgtcaccaccggcgtccccgcggcgctcgtcgagatccacaagctcggccgcaccctgaagcagcgcgccgcggacatcctcgcgttcttcgaccggcccggcaccagcaacggccccaccgaggccatcaacgggcggctcgaacacctgcgcggcaccgccctcggcttccggaacctgaccaactacatcgcgaggagtctgctcgaagccggaggattcagaccccacctacaccctcgatcgtgaagagccaggtaacccttgatccatcgagtccgttgccggatccacggcatcagctgcggggtggcctcctcccaggtggtcgagtcgatgacgtcgacccggtacccccatgccgccagccggatgcccaggtcggcgtcctcggtgacgttataggggtcccaaccaccgacctcaaccagagcagactgggcctaccctggtttttcggacacctgatgtggcggggcctggtggccctgggggaaggtgttgtcatgagcacggggaacgagaagacgcggaggcagcgtcgcaagttcacggcccagtaccgccatgaggcggcgaggatggtgatcgactcgggtcgcacgatcgccgaggtcgcccaggagctggggctgggtccccaactgttgggcaggtgggtgaaggcagagaaggagaccatgacgccgagcacgttgagtccggatgaacgcgaggagttgaagcggctccgcaaggagaacgcggacctgcggatggacaacgagttcttgggaaaagcagcggccttcttcgctgcgaagcatcagtgagtgagaagtacacgctgatgcaggcggagaaggctcggtacccgattgcccggatggcccgcctgttgaaagtgtccacttccgggtactacgcgtgggttgcggcccagcagcgggatggggatcatcttctccccagcctccgggcgcgtcggcgcctggatgaggcggtgcgccgcatatgggtggactcccgaagcacgtacgggtacctgcgtgtgtgcgcccagcttcgccgtgagggggtggtggtggatcgtaagacggtggcggcctcgatgcgccgtcagggccttgcgggcatcagcccgcgccggttccgtccggtgacgacgataccggggacgcgcacgcattcgatccctgaccgggtcaagcgacactgggacacggggcaggtggatcgcgtgtgggtcaccgacatcacctacctgaggacgcgggccgggtgggtgtacctgtgcgccatcaaggacgcttgctcccggaaggtcatcgcaaccgccatgtcgacgaccatgacgacggacctcgtggaggaggcgttgcgccgggctcgcattattcgcccgaacgcgcccaggaaagtgatcatccattccgaccgtggcacgcaattcacccccgagcagatgtatgagtgctgccgggaactccacctcgaccagtcaatgggacgcaccggggtgtgctgggacaatgcgatgatcgaatcccagtggtccgtgttgaaggctgagttctacgaccgctacgagtgggacaccccccagcaggccattcagggcgtggaggagtggatctacgacttctacaacacgaagcgcctcaactcagcgatcggctaccagaccccagtcgagttcgaagcccaacacgcggcagccctgacacgggccgcctgaaccaatccaaccgtccgaaacttgcgggtaaccccagcaaggtgtagtgaaagtagggtgtgacacgtcgaggtcttccggcagatggcgagtgtgagaacttccatcctcagggagacctcgacccctacccggccaccgacacgctcaacccgctacaccctcgttcgtgaagagcccgtttcgcggcgcccactaatacctgaaaccgttccgcagcccggcgcagtgaccatcccgcttcgacgaccacgatcgccaaccggcgacggcccgcaggagtcaagggtgcgttagcgtgagtcatgaaggcctccgtggtcaggattgagtgtggtaacccacatcctgcccggaggtcttcccttacgacccgaaccgttcacaacctcccgaggaaggacacttaagcaggagttggtagccgccacccgcaacggtgtgccggtcgcggcggcggcccgagcggcgggcatctcaagaagcactgcgatcaactggcccgccaaggccgacagcgacgacgcatagcaggccgactcactcacccgcttcgaacaaggccgcatccaacaacccccgaaacacccgatacttctccgccaaccgcacccgggtctcctcatcgagcaacgccgtgcgagccgggtcggtgttatcggccaggtctgcgcgcttcacgaccatcgcgagctcattcgcggcaacccgcgccgcataatcgggctcgggctcccccaccctgcgcgtcagcgccaacaccgccgccacaacctcgtcgctgaacccgagccgacgaaggtctgggccatccagctcggtgtcctccaccacgtcgtgcagccagccgaccgcctccgccgcatcgcggaaccccgacccccgcccgccagccagttcgccggcacgccgcgccacccgccgtgggtgaccgatgtagggctcccccgccttgtccacctggccggcatgggcccgcgtcgctacctcgcgcgccaacccgacggcatcggtgctcgtgagcgcgccatcgtccacgttgtccatgtcaccagtatggacagacccatccccgcatcccgctccatacacttcttcccatggcctcagctccacacgacatgatccgggtgcagggcgcccgcgagaacaacctgaagaacatcacgctggagatccccaagcgcaagctcactgtgttcaccggggtctcgggatcgggcaagagctccctggtgttcgacaccatcgcctcggaatcgcgtcgcctcatcgacgagacctacagcgccttcctgcagggattcatgcccaccctgggccgtccggacgtcgacctcctgtcgggcctcaccaccgcgatcgtggtggaccaggcgcaactcggcgccaacccacgctccaccgtcggcaccgtcaccgacgccgacgccttcctgcgggtgctgttcagccgcgccggcagcccccacatcggctcacccaaggcgttctcgttcaacgtggccaccatgcgcggcggcggcacgatgaccgtcaagaagggaaccaccggacaagcccaggccgtgaagcgctccttcaacgtggtcggcggcatgtgtccccgctgcgagggacgcggcaccatctccgaattcaagctggccgagctctacgacgaggacctgtcactgtcccagggcgccatgctggcccccggatacaaggccggcggctggaactaccgcatctacgccgaatcgggcatgtacagccccgacaagcccatcaagcagttcaccaagaaggaactgaacgacttcctctaccacgagccggaacgccgcaagatcgccggcatcaatatgacctacgagggcctcgtgccgcgccttcagaaatcgatgttgtccaaggaccccgaacagatgcagccacatatccgggccttcgtcgacaaggcggtcaccttcgccacctgccccgactgcgacggcacgcgactgtctgccgaagcccgctcgtcgaagatcgacggcctgtcgatcgccgacgcgaatgccctgcaggtcaccgaattggccgactggctcggtggcctcgagctgccgggactgggcccgctggtcaccaccttgcgcgcgatcctcaccgccttcgacgacatcggcctgggctacctgagcctgagtcgggcgtcgggcaccctgtcgggcggcgaatcacagcgcgtcaagctcatccgcaacatcggctcgccactgaccgatatcacctatgtgttcgacgagcccaccgccggcctgcaccccgccgacgtgcaccgcatgaaccagatgctgttgcagctgcgcgacaagggcaacacggtgctggtggtggagcacgaaccagagacaatccgcatcgccgaccacatcgtcgacctcggacccggcgccgggtcccacggcggcgaactctgctgccagggtgacctggccgggctgcgggcgtccgacaccctgaccggccgccacctggacgaccgcgttgcggccaagcaggcctggcgcacccccaccggaaccctgccgatccgccacgccagcctgcacaacctgcgcgatgtgagcgtcgacatcccctgggagtgctctgcgtggtcaccggcgtcgccggctccggcaagagctcgctggtgcaggaatcactgcccgccgacgccgaggcggtctacatcgaccagacgcaggtcaagagctcacgccgctccaaccccgccacctacaccggactgctcgacccggtgcgcaaggccttcgccaaggccaacggcgtcaagccggcgctgttcagctccaactccgagggagcctgcccgaactgccacggtgccggtgtggtctacaccgatctggcgatgatgggtggggtctccagcgtctgcgaggtctgtgagggcaagcgcttcgagccgggcgtgctgctctacaagctggccggcctcgacatctcccaggtgctcgccctgccgttcgacgaggcgcgcgactacttcggcgccggaccggccaagatcgccgccgcccagaagatcgtgggacgcatgatcgacgtcgggctgggctacctgtcgctcggccagccgctcacgaccctgtctggcggagagcgccaacgactcaagctggccatccagctgggggccaggggcggcatccaggtgctcgacgaacccactgccggactgcatccggccgatgtggagcaactgctcgcgctgctcgacaagctcgtgaaccaggggcactccctgatcgtggtggagcacgacctggccgtgatggcccacgccgactggatcatcgacatgggccccggggccggcaaccagggcggtcacgtcaccttcgagggccatccggctgacctggccgccaccggttccgggcccaccgcccgctacctcgccgagtacctggggtcctgagccggcccgccctgagcggcgcccccaatcttccggacgaacccgggggtcggcttggtagcgtcgccccgtgaccgcgaaccctgccagccaacccgcaccgggagcccacatcgagctcgagtcgctgcccaacctgcgcgacatcggcggctacccgatcgccggcggcggccgggtgcgcaccggcgtgctctaccgctcggcggcgctgagccgcctgtcccccgccgatgccgacgccctgcagcgccgcgacatccgcacgatcttcgacttccgcaccgaggtggaacgcaccgcccaacccgacgtggtgcccgacggcatgcacgtggtgctcgccgacgtgctggccgacgccgccagtgcggcccccgacgagatgctcgaggccatcaaggaccccctgcgtgcctcgcagctgctcgccggcgaccagaccgcagccatcttcgacgagacctaccgccagatcgtctcgtccgacagcgccctgcgcgcctaccggtccttcttcaccgacattgccgacccggcgaaccgcccggccctgttccactgcacctccggcaaggaccgcaccggctgggccgcggccgcactgctgctgctcctgggcgtcgacgaggcggacgtcttccacgactacgaactgacgaaccagtacctgccacgcagcgccgcggccatgatcaagaagttcaccgacggcggcggcgacccctcgacgctcacccccgtgctgggcgtcgacccgaagtacctgcgggccgcgctcaccgagatgacctcgcggttcggatccatcaccggctatttccgcgacggcctgggcatggaggacgacgcccaggacacgctgcgggcagcgctcaccgcctgagcacccgggcgcatcccccgtcacccccgggcgcgccgaccacgggccaccgggcgacacgctgaccgccatcccggcaaggcgttatgcacgggctgccacaatgggggccatgccgtcgaacagctcgaggcccgcacccggacgagcccaacccatcaacgccctcccgttcggcaccggactgggacgtcgcgtgtggcgcgatgccgccatcgggctgggcaacctggccgcgttggcgtcgcgggccgccggacgcggcaccggcacctcgatccggggccaggtgatcaccaagctctatccgcccgccttcgacgagctgatcgccgggcgccgcatcgccgccgtctcgggcaccaacggcaagaccaccaccacgcacctgctgaccgccgccctgcgcgccgtcaagggcgaccaaaatgtggtgaccaatgccgacggcgccaacctccgcgagggcatcgcctcggcgatctcgcagaacatgtcggcacccctggccgtgctggagaccgatgagcaggtggtgcccgagctcatcacccagggccatcccgaagtgctcatcatgctgaacttcagccgcgaccagctcgaccgccaccatgagatcaagtcactcggcaagaagtggcgcgatgccctgatcgccaccggcaccgctggtccggtcgccgtggcgaacatccatgaccccctggtcacctggtcggcggaggccgcccaccgcgccgtgtgggtcgacatgggggtcggctggacgcaggatgccgcgctgtgcccgaactgcggttcggtgctcatctaccagaccgacgactggcactgccccggctgcccgctgcggatgcaccagcccgatttcaccgtgcgtggcgacgacatctccaccccgcagggccagcactggacgctgcacctgcaggtccccggacgcttcaaccgcggcaacgccacctgcgccttcgccgcggccatcatcatgggcgtcgacccgcagatcgccctggacgccatggccggcgtccgggcgcccgcaggccgcttcgcggtgggcaccttcggcgagacgcgggcacgcctgctgctcgccaagaacccggccggatgggccgaatcgatcctcatcatggactccgatccggtgatcctggccatcgactcggccatcgccgatggcgccgacgtgagctggctgtgggatgtcgacttcgagcaattggcgggcaagcacgtggtgtgcaccggcccgcgggcccaggacctggcggtgcggctttcgtacgccgaggtggagcactcgatcgtccctgacctgtccgaggcactgcacggcgactatcccggccaggtcgacgtgctcgcgacctatacggccttcctcaacctgtgccggatgggtggcgtgacatggtgaagccgatcaagatcgtggtggtctaccagagcctgctgggcatctacggcgaccgcggcaatggcatggtgctggccaagcgcctgtcgtggcgcggcatcgcctcggagctcatcatggtggaaccgggccagccggtgcccaccaacggggccgtctacctgctgggtggcggcgaggaccaggcccagatcgcggccgtggacgccctgcgggccgatggtgggctcttccgggcgctggacgacggggccgtgctgttctccgtctgcgccggctaccagatcctggggaacagcttcaccgtcggcgacgacgacaccgtgatcgagggactcggactgctggatgtggacacccgtcgtggcccggtccgcgccgtcggcgaggtgctcagccactggatgacgcccgagggcgacgactacctgctgaccggctttgagaaccatggtggctatacgaccctgggtccgaaggctgccccgttcgcgagggtggagctcggcgtcggcaaccgtggcgacggcaccgacggggccgtccaggggcgtgtgatgggcatctatccccatggccccctgctgccgcgcaatcccctgctggctgactacctgttgggcgtcgccctggaccgcaggctcgaaccgctgcccaacgaacaggtcaacgacgagctggcgacgctgcgccaccaacgcatcaatgtggtgcgccacaccaagagcctgtcggaggacacccgctggctcggcgagcgcagctgagggagcaccgtcgcggcgggtccgggaaggtggacccttaccggacgagcgccccgaaccatcaccgaacagacgaagaggctccttccggatgatccggaaggagcctcttcgttcaatctcctgcactgtgcgccgccagggactcgaaccctgaaccctctgattaagagtcagatgctctgccagttgagctagcagcgcgtgcgacaaacaactatacgagtggatggcctttcatacaaaatcgaggtgccatcttcacaggtagagcccggtttcggcgtcggacagctgctcatcggccaccgcgtggaggtcgcgttcgcgcagcaggacgtagaccttgttgcgcacctccacctcggaacgctcggcggggtcgaacagcacccggtcgcccaccttcacggcgcgcacgctggggccgacggccatcacgcgggcccaggcgaggcgatgtgccatctgcacggtggacgggatgaggatgccgccctcgctgcgatgttcgcccttctcggactccatcgacacgagtacgcgctcgtgcagcatccggatcggcggttcctcgagatggcccgcatcaggcacgtccgccggcgccgcggcctgcagggtcgacgaggtgtcctgtgcgtcctgtgcgacgggaacggggttcgcccccgccgtcgcaggtgtcacgggaatctggtcgtcggacatctgtgtaccaagcgccccgggaggggtcacttgccgcggatgacgcggcccaggccacgcacggaaatcgccagcacgatcacgccggcagcggccagtgccacggtgccgatgcggtcccagcgggggccgttctcgtcgatgaatgccgacttggcctcgtcggccttctcggaggcgaattccttgccctcgtcgatggcgcggttcttcagcgccgtcgggtggacggtcgagatgagcgtctcaatgccgtaggtcaggtcgtcgcgggaggcggcaatgcgttcccggatccggtcaatattggtttcgggctgagccacggcgtcctccagtcgatgacgataaccgccacaggcacacgaatcgcgcgcgacggccttttctgttcgccccagactattgcagatcacggtgtccttcaccccacacccccgggatagcgtggccacagtgcaatgcggggtcgacttcgccggtgtcctaatctgggagcatgtcgacgcttgcccccggtgacccggcccctgaattcgcacttcccgacgccgatggcaacatcgtgcggttgtccgaccacgccgcacgcaccgtggtggtctacttctaccccgcggccctcacccccggatgcaccgtgcaggccatcgacttcaccgcctcactcgacgagttcacccaatcgggcgtcgacgtgatcggcatctcacccgacaccaccgacaagctggcgaagttccggatgcgcaagaacctgcgcgtcacgctgctggccgatccgcagcacaccgccatcgatgcctacggcgtgtggggcaccaagatgatcttcggcaagcccatcgacgggatcatccgctccaccttcgtggtggacgtcgacgccgacggcaggggcactgtgcgcgaggccctctacgacgtgcgcgccgccggccatgtggaccgcctgcgcaagaagctcggcatccccgccgccgtctgagccaccgcgcccgcaacggtcccctcacgcggttgacccctgtgtcaggccggagcgctgcccaccgcgcccgcaacggcgcagctgccccgtcctgtccacgccgggggccacggcaccggtcgctacactggtcgcgctcagccggagtggtggaattggcagacacgcaggatttaggttcctgtgccgaaaggcgtgagggttcaagtcccttctccggtacccggacgcggcgattccgcgccccacgcgacacgcccggttccgcgggcgggacaaggcaagccgcatggcaacactcaaggacttctcgcaggccactcgggcggaggtccgtgccgtgcgcgaggtcgtcgccgcactgcacgaccagttggtggcctggaacctcgtgatgtggaccgcgggcaatgtctcgcagcgcctccactcggccgacctcctggtgatcaagccctccggcgtgcgctacgagcacctgacccccgaatcgatggtggtcaccgacctgcagggcaacctcgtggacggcgccggctcgccctcctccgacacctcctcgcatgcctacatctatcggcacatgcccgaggtcttcggcgtatgccacacccactccacctatgccaccgcctgggcggccaccgggaagtcgatcccctgcgcgctgaccatgatgggcgacgaattcggtggccccgtgcccgtgggacccttccgcctcatcggatcggaggcgatcggagccggtgtcgtcgacacgctcaagcagttccccaggtcgcccgccgtcctcatgcagaaccatgggccattcaccatcgggcgcgacgccgaggccgcggtcaaggccgccgcgatgaccgaggaggtggcgcacacgatgtgggccgcccaacaactcggtggggtgatcgaaatcgcccccgacgacgtcgacaagctcaacgaccgttaccagaatgtctacgggcagcattgatcccgaggtgctggtcctgggcggcacccggcttgcccggcaactggcccggactctgaccgacgccggcatcagcgccctgacctccctggcgggccgcacccgggctccgcggcagttaccgggccccacgcgccatggcggcttcggcggcgtcgaggggctggcccggtggctgcatgacaatcggccacgcgtggtggtgaacgccacccatgccttcgcggccaccatcagcgcgcacgcggcccgggcctgccgacgggccgaccttccgttggcccggctggtgcccaccagttgggcggcacagcccgacgccgccacctggatctgggtggccgacaatgcctccgccgtccgggcggtgcgagcgctgcccgatccggtgctgctcaccgtgggccgccaggcgacggctgaatacctggccctgggtgatcgcgacatcacccaccgggtgatcgacgcccccgacgaagggctcccgccgcgatggcggctgctgaacgcccgcggccccttcagcgaagccgccgaggaggcgctgatggacgatcccggtcatcgcatcgccaccctggtgaccaaggactccggcggggatcagccagccgcgaaactcgtggtggccgcccgcaccggtgcccgcgtggtgatgatcgcccgtccaccggtccctgactacggaatcgtgctccatgacgtggccgacacgctcgactgggtgcgttccgcgctgggttgagcccccgtcgaccatgaccggcccacccggaaccgataccgccacgggggccacggacgatagcctgaaccggtgaccactgaccctgattcgagcctgttgggccgcacgcccgggctgcccgaaagccatttcgtccatgacgggttgatcaccaagcacccgatccgggccgtcgccctggcggcgctgcgtcccctgcccggccagatgctgtgggacctgggcaccggggccggatccatcgccatcgagtggtgccgcaccgacccgggatgcggcgcaatcggcgtcgaacagcgcccggatcgtgccgaacacgcccgccagaacgcggccaacctcaccctgcccggccaggtgacgatcgtcgagtccgacatcgagcaggccctgccacagctcccgggtcccgatgcgatcttcatcggaggcgggctcaccgccagccttgccgcccgctgcatcgacgccctgcacaccgggggtcgtttcgtggtcaacgccgtcaccctggaggccgagctggtgatcggacagttggcactcgaccatggtggcgagctcatgcgcctcgaggtgcacaacggcgatcacatcggtgcattgcacggcttcaagccgctgcgcatggtgaccagctggacctgggtgaagccgtgactcgtccgtcggtcacccattgcgcgggaacaatttgcgcggtggtcggccgcgcgggaaccaactgcctgaagaccaaccacacggagaccaactgtgagtgattacctgaaccgcggatcggatatctaccgcgagtcgttccgcatcatccgcgacgaggccgacctgtcgcggttccccgacgacctcgaaccggtggcagtgcgcatgatccatgccgccgccgatccggcgatcgccgccgacatcgccttcaccaccggcgtcggtgaggccgcacgcacggccctgcgcgcgggggcccccatcctgtgtgattcctcgatgaccgccactggcatcatccggtcccggctgccccgcgacaatgaggtgatcacccatatcaaggacccccgccttgccggcatcgccgaggaaaagggcgtcaccaagacctcggcggccgttgacctgtggcatgaggagggccggctcgagggctcgatcgtggccatcggcaatgctccgacggccctgttccgagtgctcgagctggtgcacgagaccggcgagaaacccgccgccgtcatcgggattccggtgggcttcgtgggtgccgcggagagcaagcaggcgctggtcgatgatgatgccggcctcgattacctgacgctgctgggcaggcgtggcgggtccgccatcgcggttgccgccatcaacgcgcttgcctccagcgccgagctcaccaacgagcaccgggaatgagcgccggccagcccgatgccaccggctccgacgccggccagccccacacccacggtcgggattcgggggcgtccccggcaccagcaggccagccgccacgccatgtgacaagctccgatgctcctgcgggacgttcgtcggtgagcagctcgacgcggaacatcgtgccacgccatgtgacaagctccgatgctcctgcgggtccgggcaatgacgcccgcctggcccgcgaggggcgccgtgcccagaccagcggccgtgaggcgcagctgacctcgtccggcctgcgtcccgggtggacgaccggcgcctgtgcggccgccgcagcgcgcgcagcctggtcggccctgcacaccgggaacttccccgatccggtcgaggtcgagctcccggcaggacgacgccccgccttcgccctcaccttcgagcagctcggtgacgatacggccatggcagccatcaccaaggacgccggtgacgatcccgatgtcaccgacggggccgtgatccgggccacggtggaacgcggacgccccggcagcggcatcacctttcgcgccggaagcggcgtcggcaccgtcacccgtccgggattgcccctgtcggtgggcgaaccggccatcaaccccgtgccgcgcacctatatcgccgagaacctggctgcggccgaccgctcggtgggcggcaatggctcacccgatgtggtgctgacactgtcgatcgacgacggggaacagatcgcgcagcgcacctggaatccgaagatcgggatcctgggtggcctgtcggtgctgggaaccaccggggtggtcgtgccctactcatgctcggcatggatcgccagcatccacgagggaatcgacgtggcgcgcgccgatggggccagccatgcggcggcctgcaccggctcgacgtcgcagcgcattgcccgggagctctaccccgacgtcgagttgttggacatgggcgacttcgcaggcgccgtgctgaagtacctgcactcccatcccctgccgcgcctgacgatctgtggcggcttcgccaagatgtcgaagctggccaatggctacctcgacctgcactcccatcgcacgcgcgtcgaccaggagcagttggcgcgactggcccgggagggcggcggcgatgacgaactcgtggcagccgtgggggccgcacacacggcctcgcaggcctaccagctgtcccacgacgccggcatcgagctgggcgacctcgtggcccgcgccgcggcacgacaggcggccatcaccgtggacgcacccatcgacatcgaggtgatctgcaccgaccgggcaggcacgatcatcggccggtcaccgttcactgccgcggcacactgaccggccccgtgcccgcccggggcggcgccactcagacctggagcgccttgaggagctcgtcgcgcacccgcacgctgcggcggggattgcgatggcccaccacggccacggtgattccgccggcctcctcggtggccggcgtgtacgcagtgccgtcggacgacttgtcggagcgcacgcagaacacccgctggcgctcggcctccgccgagacccgggcgttcacctcgggatcattcgacgcagccagcacgaaccagacctcgtcgacgtcagactcggtgaagccgcgctgttgccagtcgacgcgcccctgttcggcaagacgggccacccggataccggcgttgggggccacgacgtgcacccgggcgccggcctccagcaggcgcgggatgcgtcgctcggccacatgaccggcaccgaccaccagcaccctgcgtccggccaggcgcaggcccgacaggtagacgggggcgccgtcgccgttgccgggttcgccgacctgttcgcgatagcggtcggcgaagacctcggcgatcagggggctgggccccaagacatcgctgatgcgcacctcgatgcccggatgggtttccagccacgcgtccacctgctcggacagccaggtgcgcaggcgcccgcggaacaagaagttggggccgacgaggatctgcgtggcaccggcgtcgacggccatcgtgagcgcctcgggcacggaagggcgcaccacctggatgaacgacgggaaggcaccggcgaagccgacctcctcgccgacatagcgggtgaggcggtagtgctccgcgttggcccgcgtggtgagggcaccgcgccccaccagcaccaggctggtgtcgtcggcgcgccacgccgggccatcggcaggcgcgagcgccgcattgatgcgctcctcgagcacctggcgcacacgcggatcgggcagcaggggtccgccgtaggacacccggtggccgtcgcgtccggcctcgatgaactcggggatgtcactgttgacatgtccgcccgtgttgagcatgagcggcagcaccaccagctcgggctcgtcggagggcacggcgtcggggatgtgggccagcgcattgtgcacggcaccggccacgtcgggttctgccagttcgacgaagccgagctccacgtgcaccccgggcagggcagcccgcacctcgtcggcgaaggcgcgcgtctgggccaggccctgtgcgtcacgggtgccgtgggcggcaatgaccagtgggacgagatcagtcatgggaattctcctgggtggggacatcggagccgggctgggcagccgtggtccgggactgggtggtctgggacggggtgacccgggactgggcggtcgggggctgggcggcttcggctggcggggcggcctgccccttgaactcggcacgcgacacgcgggggcggctgccgtgcgggtagttgagccgcttgtggccgctgaccgcgccgtccatccagtgatagtcacgcggcgtcacgatgatgcgacgcccgtcaccgctggtggcgaaggtggtggtgtcggagccgacgatcacgatggtgttcatgtcgacccattcgggctggaagtcggccagcgacgacatgtgcacatgctgttgcggccgctccgcctgcgacaccgaggcgacgggggtgtccgggccgcggtattcggcaatgatcgccagggcatcgggcagttggtggatgcgtgagcgggagcgcgggttgtacagcgtgatcacgaaatcgccctgtgccgcgacccgcaccctcttgaggatgagctcccagtcggtgtgcaggtcggacaggctgatggtggcgtggtcgtggccgagcggtgcccccaggatcgcggaggccgccagctcggcggtgacgcccggcacgatgtcgacgtcgaccccgtcggtgcccatctcgagggtggggctggccatcgcatagatcgccgggtcaccacccgacaggaaggccacatccagcccggagcgggcggcgtcgatggccgcgcgggtgcgctgctcctcggtgcccatcttggtggccatcacctcggcgtggggactgaccaggtcgcgcacctgacgtacatagggtccatagccgaccaccaggttggcatggcgcaccacactggcggcgcgcggggtgagcaggtcacgcgaaccggggccgagaccgaccacgtgcaggcgaccgcgcgcagggatgcgtccgatggcgcaggtggcctcggcactcttgtgcttctcgacgatcaactcggcaccgcgggccagcacactggcctccgatacggagccgctgccgatctcgcgttccacgacggccgaggggttcggcgcgtcctgctcggcgagctgatcggcgggataggtgacatagggcacgcccagctcgtcggccagcttgatcaagcccagctcgccggccttcgcatcgacgctgaccagcgccgcgatggattccttcgccaggccggcaccggccagcgtcgcgtcaagcagctcgcgcagcgcctccaccgacgtgcccttgttgcagcccatgccgacgaccaggctgtcgggatgcaggaccaccgtgggcagctggtcgtctgatgcgccgcctgctgttggcgcggcgcggtcggtgaccacgacgcgccccacggttccgggtgcggccggctcgccgggggcgggcaccaggacattgcccggcaggggcggcatcggccacaggtgctcgcgcagcaccgagaccggggcgccgtcgatgatggcggcggtgacaccggcgacgtcgccgctgaccgcccagccgagctggtcgagcgccgggatgcccagcgagtcggtggccgtcgagaccacggcggtggcgtccagcgcctcgccgatgcggcgggccagctcattggctcccccggtgtggccgcccaccagcggcaccgcgaagtgtcctgcctcatcgaccacgacgacgccggggtcggtgtgcttgtcggccagcagtggcgcgatgaggcgcgtggtggcgcccagtgccaggtgggagacgatcaggtcgcattcgccccaggcggccaccaggcctgccgaggcggggccgtcgtagcgcttcgactcgacgccgagggcctggtcgatctggtcggcctggtgacgggcgcgggtggtgttgaccacctggccgatgatcggggcgcggtccgagccgtcggcacgggtattgcttgccggcttgggatcatcggggcccggggcattcgggtcgccggccagctgcgggctgtggcccactgcctcggcggactcgggggcggcgtcgaggatgagcaccacataggggctggccaggtcatcctcgtccacggtcagggcagcagcctcgtcgaacacgcggacgcgctcgtcggcctcgccgagtcgctcggcgaccacgaagtgcttgtcgcggccgcgaagggctgccaccagttgggcgagtcccttgccgggggcggtgagcacgccgaccttcggatgcaccccggcgatgcggatcgctgcctcgatgccgcccgagtgggcgctcaccagttgggcatcgtcccagggcagggccacggccgcgaaggcggcctgcagtgaggtgatggtgggcaccacctcgcagtgcaggccggcacggcgcagcggacgcaggatgccgaagaatcccgggtcaccggacgcgatcaccaccgccagcttgtcgtcatccagggccttcaagcgctcgatggccggggccagggcgcccagctcgacccgctgggcggcgggcacgccggcgtcgtcaagctgacggcgcccaccgaccaccaggtcggcagtcgccagatcggcgcgcagggcctcactgatgccgccgaggaaaccatgtacgcgaatcatgcctgctcgccttctgtcgatcggtgtgccccggtggtgtcgttgccggcgccgtgttggttgatggccttggaactgtccgcattgatgccgagggcaccgtgttccctcagctccttgctggcctgcggctcggcgtcgcggtattcgtggcggaatccggggtggtacaggtggctgcgcgtggcaatggggccctcggccagcgccggacccacgagcacgatggtgtgcttccacagcttgtgttcgcgcatggtgtcggacagctcgtcgaggcggcagcgcagcatcatctcgccgggccaggtgacctcgaacccgatgatgcacggagtcgcgggtgcatagccgccctcgatcagcgcctcctggagcgcacgattgcgcgccgccgacaggtagacggccatggtggcgccgtgggccgcgaaggaggcgatggtctccccctcgggcatcggcgtacggccgccctccaggcgcgtgatggtgatcgactggctcacctcgggcaccgtcaactcgacgttcatccgggcggcggccgcggagaaggccgagatgcccggcaccgtctcgaacgccaggtcgaggctgcgacacaggtcgcgctgctcggcggtggcgccgtagatcgagggatcgccggtgtgcacgcgggcaaccagcaggtcctcgtcatgggcacgggtcagcagcggctcgaggtcctccagcgacagtgccgccgaatcgaccagttcggcgcccggcttgtggtcggccaccacgtcgggcagcaccaagctggatgcccagatgatgatgtcggcctgcgcgatgacgtgggcaccccgcacgctgatcaggtcagcggcaccggggcccgcacccacgaacacgaccttgccgcgcaacggggccgcctcgttcccggcagcggggtcgggctcgtgcgagcgggtatcgctcatggtcttctggtctccttcgtcgcgccggctcacagggctcccccggtggacttgcgcttcggcaccgacaggatggtggagaaataaggcagggtctcgtcggcggacagctcgtcggcatcgacgaggctctgggtgggcagggagacgtcggtgcccaccaccgagttgcgatcgtgggcgttcaactgggcgatcacctgcggcagggtgcgtccgcccttgtagatggtcaccgaatcggcgacgtcgagcacggcgtcaaggcgctccggacccaccgtggccggcaccagcgccaggatctcgcgtccctccaccaggggcaggtcgctggccgccgagatggcctgcatggcggtgatgcccgggatcacctcgaaggcgatgtcggcaagcgcctcggcgacggtgccgcgcaggtagctgaaggtggagtacacgctcggatcgcccacggtggccagcaccacggcacgggccccgccctcgaaggcgtcgagggcagcccgggcgctggcctgccagctgccactgcgcttcggaccgacaccacgacgctgcgccatcgagaacggcacccgcacgatgcgctcggcgacctcgggggccacgtcgagcacgatcttctcggcccggcccggcccgctggccgatgaccgctcggtggccggcaccagaatgacatcagcagcccgcagggcacgcaatgccttcagcgtcacaagttccggatcgcccgggccaacgcccacgccgatcaaccggcgctcgtcgtcctcgtgcacgtcatggtcagccatgtggcctcctcaggtacctcgcccaatggtcagcggcaccggcggagtgtctgactcgccggcttcaccggctcacagtggcgggaccgtcgcggactcccgggcggccatggcccccggtcaccggcattcctcgcgctcgttgccgcgctcagtcttccacatcgatcatccggtgcccgggagcgtctgcgcccgacctcgcgcgcacccgggcgcgcccacgcgcgagcgcgcgcgagtgagtgagggcctgtccgcccgaggcggaacttgtgtaggctagtagtgctggttcggctgccacacggcagtcgtcgcaagagggaatccggtgtaattccggaactgtcccgcagcggtcaatgggaacgacacaacgtaaggcactgggcggcaacgcctgggaagtagtagtggaggaagtcgggagtgatctcgcaatgcccatgagtccgaagacctgccagcagcgacaacatctgttgacgccctcgcgtttccagatgtccgatccggcccgggagggccgtgtttggcattcggggacgatttcagatgccgaggagcacctgtgaatcacattgtcggcaacgtggcccgcaagcacgcccccacgcagcgcgaggttgacgcctcgctcccctgccactgcggcgcagccccagagcaccgtgggtccccgaccccggacggcctgatcgccgcccacgaggacccggtcgcgctgttggtggtgccgtgccccgcatggcatgcccggcatcgcatcgcccggcaatcagttaccggcacccctcggggtgccttgaccctttcaggagcaggagtcgcatgagcagcacggatcaggggaccaaccccgccgacactgacgacctcactcccaccacactcagcctggccggggatttccccaaggccactgaggagcagtgggagcgcgaagttgagaaggtactcaaccgtggtcgtccaccggagaagcagctgaccttcgccgagagtctgaagcgcctgacggttcacaccgtcgatggcatcgacatcgtgccgatgtaccgtccgaaggacgccccgaagaagctgggttaccccggcgtcgcacccttcacccgcggcaccacggtgcgcaacggcgacatggatgcctgggacgtgcgcgccctgcacgaggatcccgacgagaagttcacccgcaaggcgatcctcgaaggcctggagcgtggcgtcacctccctgttgctgcgcgttgatcccgacgcgatcgcacccgagcacctcgacgaggtcctctccgacgtcctgctggaaatgaccaaggtggaggtcttcagccgctacgaccagggtgccgccgccgaggccctggtgagcgtctacgagcgctccgacaagccggcgaaggacctggccctcaacctgggcctggatcccatcggcttcgcagccctgcagggcaccgagccggatctgaccgtgctcggtgactgggtgcgccgcctggcgaagttctcgccggactcgcgcgccgtcacgatcgacgcgaacatctaccacaacgccggtgccggcgacgtggcagagctcgcctgggcactggccaccggcgcggagtacgtgcgcgccctggtcgagcagggcttcaccgccaccgaggccttcgacacgatcaacttccgtgtcaccgccacccacgaccagttcctcacgatcgcccgtcttcgcgccctgcgcgaggcatgggcccgcatcggcgaggtcttcggcgtggacgaggacaagcgcggcgcccgccagaatgcgatcaccagctggcgtgagctcacgcgcgaagacccctatgtcaacatccttcgcggttcgattgccaccttctccgcctccgttggtggggccgagtcgatcacgacgctgcccttcacccaggccctcggcctgccggaggacgacttcccgctgcgcatcgcgcgcaacacgggcatcgtgctcgccgaagaggtgaacatcggccgcgtcaacgacccggccggtggctcctactacgtcgagtcgctcacccgcagcctggccgacgccgcctggaaggaattccaggaggtcgagaagctcggtggcatgtcgaaggccgtcatgaccgagcacgtcaccaaggtgctcgacgcctgcaatgccgagcgcgccaagcgcctggccaaccgcaagcagccgatcaccgcggtcagcgagttcccgatgatcggggcccgcagcatcgagaccaagccgttccccgccgctccggcgcgcaagggcctggcctggcatcgcgactccgaggtgttcgagcagctgatggatcgctccaccagcgtctccgagcgccccaaggtgttcctggcctgcttgggcacccgtcgcgacttcggtggccgcgagggcttctcgagcccggtgtggcacatcgccggcatcgacaccccgcaggtcgaaggcggcaccaccgccgagatcgtcgaggcattcaagaagtcgggcgcccaggtggccgacctctgctcgtccgccaaggtctacgcgcagcagggacttgaggtcgccaaggcactcaaggccgccggcgcaaaggccctgtacctgtcgggcgccttcaaggagttcggtgatgacgccgccgaggccgagaagctgatcgacggacgcctgtttatgggcatggatgtcgtcgacaccctgtcctccacccttgatatcttgggagtcgcgaagtgagcactctgccccgttttgattcagttgacctcggcaatgccccggttcctgctgatgccgcacgacgcttcgaggaactggccgccaaggccggcaccggagaggcgtgggagacggccgagcagattccggttggcaccctgttcaacgaagacgtctacaaggacatggactggctggacacctacgcaggtatcccgccgttcgtccacggcccgtatgcaaccatgtacgcgttccgtccctggacgattcgccagtacgccggtttctccacggccaaggagtcgaacgccttctaccgccgcaaccttgcggccggccagaagggcctgtcggttgccttcgacctgcccacccaccgtggctacgactcggacaatccccgcgtcgccggtgacgtcggcatggccggtgtggccatcgactccatctatgacatgcgcgagctgttcgccggcattccgctggaccagatgagcgtgtccatgaccatgaacggcgccgtgctgccgatcctggccctctatgtggtgaccgccgaggagcagggcgtcaagcccgagcagctcgccgggacgatccagaacgacatcctcaaggagttcatggttcgtaacacctacatctacccgccgcagccgagtatgcgaatcatctctgagatcttcgcctacacgagtgccaatatgccgaagtggaattcgatttccatttccggctaccacatgcaggaagccggcgccacggccgacatcgagatggcctataccctggccgacggtgttgactacatccgcgccggcgagtcggtgggcctcaatgtcgaccagttcgcgccgcgtctgtccttcttctggggcatcggcatgaacttcttcatggaggttgccaagctgcgtgccgcgcgcatgttgtgggccaagctggtgcatcagttcgggccgaagaacccgaagtcgatgagcctgcgcacccactcgcagacctccggttggtcgctgaccgcccaggacgtctacaacaacgtcgtgcgtacctgcatcgaggccatggccgccacccagggccatacccagtcgctgcacacgaactcgctcgacgaggccatcgccctgccgaccgatttcagcgcccgcatcgcccgtaacacccagctgttcctgcagcaggaatcgggcacgacgcgcgtgatcgacccgtggagcggctcggcatacgtcgaggagctcacctgggacctggcccgcaaggcatggggtcacatccaggaggtcgagaaggtcggcggcatggccaaggccatcgaaaagggcatccccaagatgcgcatcgaggaagccgccgcccgcacccaggcacgcatcgactccggccgccagccgctgatcggcgtgaacaagtaccgcctggagcacgagccgccgctcgatgtgctcaaggtggacaactccacggtgctcgccgagcagaaggccaagctggtcaagctgcgcgccgagcgcgatcccgagaaggtcaaggccgccctcgacaagatcacctgggccgccggcaaccccgacgacaaggatccggatcgcaacctgctgaagctgtgcatcgacgctggccgcgccatggcgacggtcggcgagatgagcgacgcgctcgagaaggtcttcggacgctacaccgcccagattcgcaccatctccggtgtgtactcgaaggaagtgaagaacacgcctgaggttgaggaagcacgcgagctcgttgaggaattcgagcaggccgagggccgtcgtcctcgcatcctgctggccaagatgggccaggacggtcacgaccgtggccagaaggtcatcgccaccgcctatgccgacctcggtttcgacgtcgacgtgggcccgctgttccagaccccggaggagaccgcacgtcaggccgtcgaggccgatgtgcacgtggtgggcgtttcgtcgctcgccggcgggcatctgacgctggttccggccctgcgcaaggagctggacaagctcggacgtcccgacatcctcatcaccgtgggcggcgtgatccctgagcaggacttcgacgagctgcgtaaggacggcgccgtggagatctacacccccggcaccgtcattccggagtcggcgatctcgctggtcaagaaactgcgggcttcgctcgatgcctaggccgttcaatgtccccgagcttgttgacgaggtcctcgccaacaagcgcccgggcctcgcgcgtgcgatcacgctcgtcgagtcaacactgccggctcaccggccgttggctcgcgagctgctcgccgccctgctcccccattcgggcaacgccatccgcgttggcctgacgggggtgccgggggccggcaagtcgacgttcaccgacgccatgggcgtgcggctcatcgatcgtggccacaaggtcgcggtgctggcggttgacccgtccagttcgcgcaccggcggctcgatcctgggcgaccgcacccgcatgggcaagctggctgagtccgacagcgccttcatccgcccctcgccctcggcaggccacctcggtggcgtggcgcgggcgacgcgggaggcgatgatcatcgtcgaggccgcaggctatgacacggtgatcgtcgagacggtcggtgtgggtcagtccgaagtggcggtgtcgggcatggtggataccttcctcatgcttgcgctcaccggttcgggcgaccagctgcagggcatcaagcgaggcattctggagctcgccgatgtgattgccgtgaacaaggccgacggggacaatgccggcgaggcgcgggtgaccgcgcgcgatctgtccatcgccatgaagctcatcaacgacgaggccgatgggcggcgcactccggtgctcacctgctcggcctacaccggtgatgggctggatgatgtgtggaaggccgttgtcgaacaccgtgactgggtggacaagacggtgggcctcaagcagtatcgcgccgatcagcaggtggattggatgtggtcgcagatccagagcgctgttctggattcgctgcggtccacgcccgagctgctgaagctgggccacaagctcgaacacgaggttgaggagcagcgcaccagcgccctggaggcgtcgatggagttcttgtcgacctatgccaagtcggttcccggatttgaatgggatccgtcataggcattcgctcactcccgtgaatctcctgatgtgaacagggcgccgtccgcagctgcggacggcgccctgttcctgtctcccccatgtacccggccggccgtgttcctgccgagccgtgtttctgcctggccatgttcctatccggccctgctcttgtctcgccgtgtttcccccggccaggcacgggtccaccgccgatccctcagccggggtcggaggtaccgggggtgctcgtccccctgtctgcccctgtatccggggtcggcgacgtcggacgcaggcgggcccagccgggtccgtgttcgggctcggcctcctcgtccgggtggtcgaattccatcggcagcaggccggcgcgatgcagggcggggtcgtcggcacgcagggagcgcacgggtccgatcccggtgcgacgcgtctcgaagcgcaccgtcaccactcccaggcccgatccccacacccagccgcggccgtgctcgtcatgctccacctcggccccgggtgaccagctctgggagccccgccgcagcgcggaggccacctggcgttcctccatgaccggggccacggatgcctgctggtcgtcgagcacgaacagctcttcctgggcggcctgcgcgaagccgcccacgccgacgccgatcaggcggaatccctgcccgatgcgcacgccggtgatcagcgcctgggccgtcgccgcgatccgctccgggttgtccgtggcgcctgacagcgtgcgtgagcgggacagcgtcgtgaagtcggccagtcggaccttcacggtgacggtgcgggcgaacaggcccgcccgggtgagcctgccggccaccgcgcgcgcatcgcgctcgatcaccgaggcgatgactgccggatcggtgaggtcggagtcgaaggtgtcctccaccgagatcgacttcgcctcgccgcgtgggctcaccgcccggtcgtcgcgtcccgaggcaagcacgtgcaatgactcccccacggcctgccccagctcgcgcaccagctccgcgacgctggcctcccgcaggtcacccacggtgcggatccccaaccgtgacagccggtccatggtggccggcccgaccccggggatggcgttggccggtagcggcgacagcacatcgcgttcgctacccggtggcacgatcaactgcccattcggcttggcccgctcgctgccgagcttggccatcaacttgctggtgccgacaccgaccgatgcgtgcaggccctcggtgcgatggacgatctcggcgcgcagctcacgcaccaggccggcgatcgcctcggggctggtgtcctggccgccggcctccaggtcaacgaaggcctcgtcgatgctcaggggctccacgagcgggctgagctcgcccaacagggccatcacgatgcggctcgactgccggtaggcgtcgccccgcgggctgagataggcggcgtgcggcgccaggtgacgggcctgggaggtgctcatcgccgaatgcaggccgagcttgcgggcctcatagctggcggtggccaccactccgcggtccccgacgcccccgacggcaaccggcttgccgcgcagggacggcttgtcgcgttgctcaaccgaggcgaagaaggcgtcgaggtcgaggtgcaggatgctggccgtggcccgcatcgctcagtggtcggcgaccgcgtcccccgtggcggggggcagcggacgcggtgcgctgatgcgcgcatagtgcacgaagtcgaactccccgtgcggctcgctgctggtctgcgaccagtcctgcgcgctgatctcggggaaggtgaccgagccgtcggccggttcgtgcacggcggtgatgtcgaggtcggtcagccagtcccaggcggccttgtagatctgtcccccgccgatcacgtagatgcgctggtccagccccgaggccaccgcgagtgcctcctcgatgctcgagacggcgatgccatgggagccctccggcgcctgatcgggccaggtgacggcctggggtgtgcgactcacgacgatgttggtgcgtccggtgagcaagcccatggcgtcgtgggtgcgtcgtcccatgatgagcggatggccgagcgtcacgcgcttgaagcgggcccagtcctcggggaacttgaagggctggtcgtgcccatcgccgatcacgccattggtcgccaccacggcgatcgcgaccaccccgggggcgtcctcgtcgcgcagcacccgcttgggggcattgtcatggcttgcactcgcatcggtcatcatctgctcctcggtggttcggctcatggaatgtgggcaactcaggaatggacgcgcgggccgtgggcgacctcaagccggggtcgcggcccccgtggccacccggcggaaggctcacacggcgatgggggccttgatggcggggtcgggttcgtagccctccacggtgatgtcggacagctcgaactcgtcgatgttcctcacctgcgggttgagcgccaaccgcggcagcgccttgggcgtgcgggacagctgttcggccacctggtcgaagtggttgtggtagatgtgcgcatcacccagggtgtggacgaagtcgccgacgcccaggccgcacacctgcgccaccatgtgggtgagcagggcgtagctcgcgatgttgaacggcacgcccaggaacaggtcggcgctgcgctggtagagcccgcaggacagcttgccgggctgcccgtcctcgccgggggtcacgtagaactggaacagcaggtggcagggcggaagcgccatgtcgtcgacctcggccacgttccaggccgagaccaccaggcggcgtgaattggggtcgttcttgatctggtcgatcaccttggcgagctggtcgacgtggccgccaccgggcaccggccagctgcgccactggcggccgtagacgggccccaggtcgccgttctcgtcggcccattcgtcccagatgtgcacattgttgcggtgcagccagccgatgttcgtgtcgccgcgcaggaaccacagcagctcgccgaacacgccacgggtgtagatcttcttggtggtgaccagcgggaagccgtcggccaggtggaagcgcatctggtggccgaagacgctgcgggtgccgacgccggtgcggtcggacttgtcgatgccctcgtccatcacgcgggtgagcaggtcaaggtattgacgcatatcagggctccagaggggtgacgccgcccgatggcaggtcgcccaggttggcaccgctcgtgggcttgccgaccgccgggatggaggcggtccattcgctgggcggtgcggtgggggccggaccggagttctgcgatccggggacgatctcttcctcgtcgtcgagttccttgggggccgcaaggccgagctgggccgccaggatcggcagcatggcgcgcacggaacgtccgcgatggctgatcgcgtccttctcggcagccgacatctcggcggcggtgcgcaggcgtccctcggaatcgggaacctgctcgtcgggcacgaagatcgggtcgtagccgaatccgtgggagcccttcgggcgcgtggtcaggtgcccggtcatctcaccccgggtggtgaactcgcggccatcgggcatcaccagcgccatcaccgacacgaattgggcctgacgacgcccgcggggcacgtcctcgatctggcgcagcaccaactccatgttggcgatgtcctcctgctcggggccgtcccagcgcgagctgcgtaccccgggcatgtggcccagggcgtcgacgcacaggccggaatcgtcggcgagtgcgggcagtccggagtggatcattccctggcgggccttgatgagggcgttgccctcgaaggtccactcggtctcctccggctcgggatagctggcgatgtccttcagcgagagcacctggatgtccatgtcatattcgacgatgatccggcgcagctcggtgagcttcttggcgttgttggtggccaacagcacttcagaggtcatagctgggccttcccgtcggcggcggcgatcacgcgttgttgcaggtcggtcagctcacgatttcccttgtcggccaggtcgagcaggcgtcccagcagcttgcggtcgaaggtggcgccctcggcggttccctgcacctcgacgaagtcgccggtgccggtggccacgatgttcatgtcgacgtcggcggtcgagtcctcgtcgtaggccaggtcgagcatcggcacgcccttgacgatgcccaccgagatggccgagacggagccggtgaggggctcgcctgccagcgagccacgctcgcgcagccactcgacggcgtcgtggagggctacataggcgccggtgatcgaggcggtgcgggtgccgccgtcggcctgcagcacgtcggcgtcgacgacgatggtgttctcacccagcgccttgtagtcgatgacggcgcgcaggctgcggccgatgaggcggctgatctcgtgggtgcggccgctgatcttgccgcgccgcgactcgcggtcattgcgggtattggtggcgcgcggcagcatttcgtattcgctggtcacccagccgagaccggagcccctgcgccaacgcggcacgccctcggtgaccgacgccgccacgagcacccgggtgcggccggcctcgatgaggcatgagccctcggcatggtcaagccagtgccgggtgatggaaacgggacgcagctgatcaagtgaccggccatcgctccgcgttacggacttcgtcgattcagacacgcctgcaaatctacctgtgatgccccgttcgcccaatgctggccggaccgggccgcaggcgctcgcgacaaccctcacccgcaccgggccggacactttcgctacaggcccaccccgagggtgcgccgggccattgacccggctgcccggggctcacaactcggcgggttcggacaacctcaattggcgcacgccattgacgaagccacccatgaggcgacgccccaggccaccgaactgggcggggtcgccggtggtgaagaattcacgctgcggctcgtggggttcggtgcgcagcaggtcgtcgcgggtgagctcggcgaacacggcgcgggcacactcatcggagctggacaccagggtgacgtcctcacccatcacatagctgatcaccccggacagcagcgggtagtgggtgcagcccaggatgagggtgtcgatgtcgtcggcctgcaggggcgcgaggtattcacgggcgagttgcagcacctcggggccggtggtgatgccggcctccacgaactccacgaagcgcgggcacacctgggtgaacagcttcaccggcgaggcggccagggcatcgttatacgaccgcgagatggcggtgccgcgggtgcagatcaccccgacgcgtccgttgcgggtgatccgggcggccttgcgggcggccggcagcaccacttcggtgatcggcaggtcgtagcgctcacgcgcgtcgtgcagggctgccgatgatccggtgttgcaggcgatcaccagcgacttcacgccccgggcgaccaggctgtcgagcgcctgcagcacgaactcgcgcacctcggcgatcggacggggaccgtagggggcacgggcggtgtcgcccaggtagatgatgtcctcgcggggcagcaggtcgaccacggcccgggccacggtgagcccgccgaatcctgagtcgaagattccgatcggcgcgttgacgttcctgttcacccgaccaactctagacgggcaccctgaatcgtcgggatcggccgaccggccacactgccgccgtgggcgccgcgcgggcgcccggggtcagtgcaggcagtcgagcagggattcctgcacccagcccagccattcatagatggagaagacggcggtacggggatcctcatcgggcagttcgcccaactcgtcggcgtcggctgaggtcttgatgcccagtcgcacggccaccgccacccgcagcgcggtcagcgtcttgagccagtcgttgacatgctcgtcaggcacggcgcagcgcccgtcgtggcccacctggttcatatcggacagcatggcaacggccgcgtcgagcttctcgtcacgctcggaggcctggctgaagcggcggaactcggtggaggcgccctcgtcgtcgcggtaggcatcggggaagaggcgacgcaacacggggtcaacctcgggattggtggcgaaatcggccttgacctcgcaccccatctggttctccagctcggcgaacagggcctcgggagagcaatcgctggaatcattccaggagctggcacgcaccggcggcatcgcatcggagcgcagcaattggagcaatgtcttggtcagggagcacaggatcgtcaactccgtgtcctcgaaggtgcaggtgagctggccgcggcggcgccggaaaccgtgcatcattcggcccgcgacactgttgcccacaggccaaagccgtgcatggcgttcacatcccgttccatctcctcacgccctccggaactgaccactgccttgccctccatgtgcacctgcatcatgagacgctcggcacgatcgcgggaatagtggaaatagctacagaagacgtgggtgacatagctcatcaggttgaccggatcgtcccagaccaccgtcacccacgggttggcgctgagggcatcctcggcaggacgctcggcgagtgccgtgccaccttccggggcagtcatcggtgcagattcggacatgtgtctatctttacccatcacgcaaaaggcccgggtgatccgggcgcagtcggtgctcccgcgccggtgtgaccccctgcggcgcaccccgcgccctagtctggagccatgacctccacggctctgatgaccgatatgtacgagctcacgatggtgcgggctgccctgcacaccggccaggccttccaccgcaccctgttcgagctgttcccccgccgcctgcccagcggacgcagctacggcgtggtgggtggcaccggtcgggcactcgaggcgatcgagaacttccggttcgacgacgaacagatcgactacctggtgggcgccggcgtcgccgacgacatgctggccgaatacctggcgagctaccgcttcaccggcaacgtgaccggctatcccgagggtgaactgttcttcagcggctcccccctgctgcaggtggagggcagcttcgccgaggcggtgctgctggagaccctcatgctgtcgatctacaaccacgactcggccatcgcgtcggcggccagccgcatgacgatggccgcggagggccgcccgatccaggagttcggggcgcgacgcacccacgaggaggctgccgtggcggccgcccgcgccgcatggatcgccggcttcagcggcacctccgacctggaggccggccggcgctggggcctgccggtgagcggcaccgcggcccacgcgttcaccatgctctacgacaccgaggaggacgccttccgcgcccaactggagtggctgggcgaggacaccaccctgctggtggacacctacgacatcgacgcggccatccacaaggcggtggagctgaccggcggcaagctcggcggcgtgcgcatcgactcgggcgacctgagcaccgaggtgaagcacgtgcggcgtctgctcgactcgctgggtgccaggcagaccaagatcatcgtcaccaacgacctcgacgaataccagatcgcggccctgcgcggtgccccggtggacggcttcggcgtgggcaccagcctggtcaccggctcgggccatcccacctgtggcttcgtctacaagatggtcgcccgcaccctgtcggacgatccgaacgcgccgatggccgatgtggccaaggcttcgaccaacaagaagacgctcggtggacgcaagttcgccagtcgcgccctggatgaccagggggtggcgcaggcggaggtgatcggcatcaatgccgccccgcgcgtgggctcgaacgaccgcatgctgctgaccgagctggtgagcgacgggacgatcgtcggtgccgagcccctgcaggcggcccgtgaccgccacgaggccgcccgggccgagctccccctggatgcgcaccgcatctcgaacgccgagccggccatccccacgatcatcctcgacgagcagggccacgacctggagaacgtctaccaggccggcccggcgccgcagaacatctgaactgcagaacatctgagctgcggggcgtccggaccgctgggcatccggtccgcggccccgcacggcagcgcccgccgggtgatggtcggggcccgtccgtgtcgacacccccggcgaggtggcggtgggcgatccggtcggcccgggtgataatttcgcagctatgagcagccttcccggtgtgtccgacacctttgacccgcagcgctggcgcgagatccagagcgaagacgatcccctcgtcgacaccacctaccaccgactgatctcacggggtgccaccgatggcgtcccggccggggtcgacctgccggtggtgcgcatcgccatcgatcgtcccgagatccgcaacggcttcgatccccgcaccgtcgacgagctctaccgctgcatcgacgatgcgcgctccacgcccgatgtggcggcgatcatcctcaccggcaacggcccctccccgaaggacggcggctacgccttctcatcgggcggcgaccagcgctcgcgcggcaccgatggctaccagtacctggccgaccagaccccctatggcgagcgcggcgcggaccccgcgggcatgaccgagcagcgtcgctcacgcatcgatcgcggccgtcgggcacggatgcacatcctcgaggtgcagcgcctgatgcgctcgacccccaagcccatcatcgcggcgatccccggttggaccaccggcgggggccactccctcatggtggtctgcgacctggcggtggccagcgccgaacatgccgtgttcaagcaggtggacgccaatgtgagctcgttcgacgccggctacggcgctggcctgctggcccgtcaggtgggcgacaagcgcgcccgccagatcttcttcctggccgagccctacacaccccaggaggccgaggcctggggcgtgatcaacaaggtggtgccccatgccgagctcgaggacacggcgatcgactggggcctcaccgtggccaccaagtcgccgcagtcgatccgcatgctgaagtatgcgttcaacatgatcgacgacggcatcgccggccagcaggccttcgccggcgaggcgacgcgcctggcatatatgaccgaggaggcccaggagggacgcgacgccttcctgcagcaccgcgcgccggactggtcgaagtatccctactacttctgagccggccatgacatcccggcccaccggcggcccgacctgcgccgcggacggcgtgaccacacggggcctgcgatgacacccgacccggcctcgagggtgcagctgctgcgcgtcgagcgcacgcagtcgtcgatcgatgcgctggcgggcgccctgcatcggctgctgtgcgagcgcgagtcccccgtgctgatgcccctgggccccgatgaggacccggtggcgctgcgcgacgacctcgcgcgacgcatggtgcgtctgccggacgatgtgcggttggtgatgcgcacctccggctcgaccaccggccacgggcgtctggtgggcctgtccgccgcgcaactgcgggcgtccatccgcgccaccgaccaacgactgggtggtccggcacgctggctgctgacgctgcccgcccaccacatcgccggcctgcaggtggtggcccgctccgtgctggacgggactcgacccggcctggtgcaccaccttgacgcggcatccttggccacggcggtgggcgccgcgcgcgccgggcggcccgaggcgtgggtgaacctctcgctggtgcccacgcagctgcgcgacctgctggatgatgcggccgggcgcgacgcgttgcgctcgttgtcggccgtgctggtgggcggcgccgccaccgaccggcagctggtcgacgaggcgctcgccgcgggcgtcgccctgcacctgagctatggcatgagcgagacctgcgggggttgtgtctacgacggcaggccgctgcggggggtcgagctgtcactgggtgagcgtcccgacgccggcagcgatcgcggcacgatctggattgccggtccgatggtgatgagcggctacctggacggcgagcccggagtgtcgcagctcaacggcaccaagtggcttgccacctccgacctgggccacctgcgccatgggcgactggaggtcaccggccgcgtggacgatgtgatcatcaccggcggattgaaggtcgccgccgaccaggtgcgggcggcagtgctgtcggcaccgatggtcgcccgggccgccgtcgtggcacttccccatccccgctgggggcaggtggtgagcgccgtggtggtgcccaccgatgcgtggacccaggactcaccggcggcgctgcgtgacctcgtcggagagctgttgggacgccagttggcgccgcgcgtggtggtggtgaccgaccacctgccgatgctggcgtcgggcaagctcgatcgcctggcggtgcgcaaccacgccgagcaggtgcgccgcgacggtggggcatggacgagcgattgactgcccccggcagcgatggcgccgtcacatgcaaccgggcgacagactcccgtagacttgggcgccgtggcccctgcagacgataacgaacgaaccaaggacggtcgaccgttgcatgacgaggccaagctgcgccacgtgggcaatgccgaatggctgggccagatcctgcagagcgccccgtccgatgtcaccgccgaggaactggagcgtccctgggtatgggccgcccccgatgacggtcccgccctggtgggctggggcgaacaggcccgcttcgaggcttccggcgatgcaccgatgacccatgcctggcaggacttcgcccagtgggcaggtgagggtcgcgaccgactaccggccttcggatcgttccccttcgacccggcccagccgggcttcctggtggtgccccgggtgctggtgatgcgcgagcgtccgggggcggccacccgggtgttccccgccgacgcagccgatccccgcccggccgatttcgcggtggccagcgagctgcacgtggacttcacgctgccccgggggtcccgggagcactggaccgaggccgtggacgcaacccgcgcggtgctgagtgagccggtcgggagcgacacgggcgaggtcatgcagaaggtcgtgctggcccgacgtgtgcacgcccgggccgaccgtgcgctggaccagcgacgaatcctggcgaccctggcggcccgcttcaccgactgctggacgttctcccacgacgggctggtgggggcaaccccggaactgttggccgaggtgcacgacggggtgttccactgccggatcctggccggcacgcgcaagccgaagtgggatgaggagctgctcaccgatcccaaggagcgccgcgaacacgagctgtcggtcacctcggtgaccacccacctggcccaagccggcctgctcgatgcgcaggtgaccgggccgttcctgctgcggctgcccaatgtgacccacctggccaccgacatccgggccacggtgcgtccgggacatggttcggccgacatctccgacctgctgtacccgacggcggcgatctgtggggcgccgcgtgacctcgccttcgcacagatccagcgcgtcgagggcctcgaccgtggccgcttcagtggcccggtcggttggctgcgtccggacggatcgggccaatgggccctggcgctgcgctgcgcccaattcgacgacggatcgcgcaatgccgaccttttcgccggggccgggatactccccgattccgatgccggacgcgaatggctcgagaccgatgccaagatggagcccatgcgtcgcgccctgtcggccggataatggcaccatgcaggcatgacaaccgcaccatggtgcgccccgcgctcacgctgaaatagtttaatgaccagtcgatctcgtgactactccgcttatcggctattccgcttgttgactagtccgtttgttgactagtccgtttgttgactagtccaccttgcagtttgcttgatagtcgagctgtagcagccccgcgtcgcccagctccaatgccgcgatctcggcgtcgacgctctccctgaagtccggggcgccggccttcgcatacaggtgcttttccttgatcgtgcgcatctgcgccaggctctgttgcgcatgtgccgctgggtcctgcacgtagtagttcacccacgcgcaccaccacgtggaatcggctgccgaaaagccctcccccgggaagctgtgcaccggatagccgtcgccggtaccgccgtccttctccgtgaagttggaacccgggtcggggaagccctggggccaggtcagcgtcgccgcctcctgacggtattccgcatccacgcccgcgccgtcgatcatgccggaatcgtgcgacgaggaacaggcactcatggcaatcattgcggcaccggcacagcacgcggcgataactcgtgacatcaacatgggccattcctcactgtccgttccgctcattctgggcagcccggacaagaccggtcaagggaattcaggaattgcgcgataataccctccggtgggctggcgatccacgagccgcctcaacccccggcgccatctgcgcgtccaccgggggtgggaggccgtggtcccgctcagcgatgccggggagcctggtcctcacgcaggtagcggccgatcaccgactgagggtcgtccatgatctgcgacggcgtcccggtggcaatgatgcgaccaccggcctcgccgcccccgggcccgaggtcaacgatgtagtcggagttggcgatcacgtcgaggtcatgctcgatgacgatcaccgtggcgccgtggtcgatgagtcgctcgaagacgcccaacagcacctcgacgtcgagggggtggagtcccacagtcggctcgtcgaacacgaagacggcgtcgcgctggtcacggcccagttccgaggcgagcttcagtcgctgggcctcgccgccggacagcgccggcgtggcctcccccagcgtgaggtatcccagacccaggtcgcgcaacacctgcagccgggcatgcaccttcggcaggtcggcgaccctggccaaggcatcatcgacggtcagcgccagcaggctgggcaggctgagggcaccggcatcctcgtcctccccggcccccggaccgggcttcggcgggcgaaggacatcgtctgcggccggtgcatagcgtcggccgtggcagtcggggcacacgatcgtcacgtcaggcaggaattgcacatccagcgagatctgcccggtgccctcgcaggtggggcaccgcagcttgccggtgttgaacgagaagtccccggtcttgtagcccaggcgacgggcatcgggcgtctgcgcataggccctgcgcaggtcgtcgagcaccccggagtaggtggccacggtggagcgcacattgatgccgatgggcgaggaatcgatcaggttcgtgcgcgcaacgccgggcgcgtccagggccctgacgtggctcggcaggcgctctcccccaccggccgcccgcagcgccggcacgagcgactccaggatcagcgtggtcttgcccgagcccgacaccccggtgatcgccgacaagcggccccgcggcaggtcgagcgacagggcgtgcacggtgtgcaggggtgcggtctccaggtggatgcggccctcggtgaagaccctgtcgggcgtcaccggggtgcgcacctccacccgccgcgcccccgacaggaagcccccgatgcgcgaggcggggtcgtccgacaccttctccacggttccggtggacaccacggtgccgccccccgaacccgagccgggaccgatctcgatgagccagtcggcctggcgcaacacgcgcacgtcatggtcgacgaccaccaccgagttgccgtcgtcgagcaggctgccgatcaccgacagcaggccgtcgacattggaggggtgcaagccgatcgacggctcgtcgagcacatagagcaccccggtggtctggttgcgcacggcgcgggacagttgcacacgctgccgctcgccggtggacaaggtggcggcggcccgatcgagcgccaggtagccgagtcccaggtcgagcagtcgctgggcgttgccggtgagttcgccgatgatcgacgccgccatgggacgcatatcggccggcagccacggcccgatgccgggcagccatgcgatgagcgcgtcgagggtcttcgcggtgacctgcgccaggttgatgcccagcaccagcggggcgcgggcggccggcgacaacctgctgccatggcattcggggcacacctgcaccgacaggaaacggttgatgcgcgccagcttctgctccgagttggccttgtcgagggccttctcgaccgcatcacgcgcattgcggtaggtgaggttgaggtcgaacaccttgccgctcttggaggggatcgtgacctcgcgcttcacctccgggccatggaagacgatgtccagttcgcggtcggtcagctggttgaaggggacgtcgatccgcacgccgagctgcaccaccgcctgctgcatcacatcgcggatgccgaacatgtgccacggcgccaccgccccctggtcgatcgtcagggtgggatcgggcaccagcgtggagtcgtcgacgtcacgcacgatgccggtgccctggcagcgcgggcaggccccctcggagttgaaggccagtgactccgcacccggtccgtagaactgcacctggcagaccgggcaggtgatgggcttcatgagcgccacgttcatcgtgggcggcacatggtgcccgttggggcactggtggctggccagccgcgagaacagcaggcgcaggctgttgagcagctctgtggaggtgccgaaggtggacctcactccgggcacgccggggcgctgccgcagcgcgagggcggccggcacatgctccacctcgtcgacgctggcccgtgcgctctgggtcaggcgtcggcgcgtataggtgctcagcgcctcgagatagcgacgcgacccctccgcatagagcacgcccagggccagcgacgacttgcccgagcccgacaccccggcgatccccacgagctcgcccagcggcaccgacacatcgatgttcttcaggttgtggacgcgcgcgccgcgcacctcgatggtggtcggccagtcgctcatgtcgtggccgctgatgatctcgtgtggcatggtcccatcatctcccccgccggtatgggggccgcggactggacatcgggcgaccggggcccggatcgggaccggaatcgcgccatctcaccccagcgggggcggtatcaccccaccgggggcagttcgacctccacgatgctggcgccgctgatcggctcggacaggacctgcggcagttccagcacatctgccacatgccggtaggacgcccccaccgctccggccagctgccggacgtcgagcacctggggtgtcaggaaatagcgcgacagcagtgcgggggccgccgatccgtgttcgagtcccgcgaagatggcgccgccccggtcggccagcaccaccacctgcacgtcgggcacggcctcgttcatcccccgcaacaggcccaggccgtcgtgggccagggtgaggtcgcccaccaccgcacgcaccggacgcccggtgccggcggcgacgccgatggctgtggacacggtgccgtcgataccggccagcccacggttggcgatcaccaggggggcatggtcccccgggacggcccggcggtcgaaggagcggatcactgccgaggcccccagcaccagggccggggcgtcgggcgcgccatgggcctgccagatcagtcgtgccgccgtgtccttggtgctgcgcggcgccggctcgtcggccccgatccaccgtgccagccactccccctgcgggttgttggcgatgtgcaccgggccgcgcaccacctgggcaaggccggccacatcggtccaccgggaaccgcaggtgaccgccaccatccgcacgtcgtcgcgggccaacagcgccgagaccggacgtgacaaggtgggatgcccgaacaccagcacgccctcgatctgggcggcgagtggtgaacccagcagttgttggtagtcggtcagcgcattggcgccgaagcgtgcgcccgacgacggctcggccagcaggggccatcccccggcggtcgctgcctgctgggcctgatcgccggcaccgtcgccggccaccacgacggtcctgtcgggcatgggcagctcggtgggtgcgccgggtgcctcccggtggggctccggcgcaggcgctggcccgggcaaccactggtcgtcgggcttcaagggctcgcgcaggcagacgttgaggtgcacggggccgggattcccgttgaggtttcccagggcagccgtcatggcccgtcggacaaggcccgacaggcgcccgtccacggggaagccggccgggatgtcggcctcctggcgcaccgcatgggcgaaaatccccaattgttcagtggtctggttggccccggtgcgccacatctcgtggggacgatcggcgctcaccaccaccagcgcgaccccggcggcatcggcctccagcacggccgggtggaggttcgccaccgcggtgcccgaggtggtgacgacggcgactggtcgcgccgtgccctgcgcggccgccgccttggcgagtcccagagcctggaagccggcagcgcgctcgtccaggcgcaccgccacccgcaaccaaccggcatgctgtgccgcgtccagtgcgtaggcaaacggcgcgtcgcgcgaaccggggcaatagaccacgtcgcgcaggccgtgcgccacgagcgccgtgaccagcgccctggccagggcggccgagcgcaccgggggcccgcccggcacggcctgccccacggcagccgccggttcgccggagcgcgcctgcggggggttctggggatctgcggtattgctcatgggtgtcttcctgtgcctgcttcccgtgtcagctcttctcgccggcgcttctcatcaactgctcgtgtcgtccccggggtcacccccgtgtgcggtgttcgtccgacggtccttccggcgtggcctagagctcgtggcagatggcggtgagtcgctcgacccaccgatcgaccagggcccgggggacgtcctggtgcaccggctggtccgcctcgacgcgtcggggcacgagggccccgccctcgggcaggagtggactcgtggtgacatcgccggtgaacaattcgatggtggccagcccacaggcatggcccagccgcggcagggacgctgccagggcggtgccgatgcccagtccgaccgaggtgtccagggccgaggagaccacggcatccaggccggcccgatcgaccacgtccagggcgcgtgccacgccaccgagcggctgcgccttgacgatcacgatgtcggcggccccggccctggcgacggccaccggatcgtcggcgcggcgcaccgactcgtccgccgcgacgggcacggtgatgcgtcggcgcacccgggcgagttcctcgacgctggggcagggttgttccacgtactcaaggccctctgctgctgcgtcgagctcgatcaccgcagccactgcctcgtcgaccgaccaggcagcattggcgtccacgcggatgcggccctcgggccccagctcggcgcgcgcggcagcaaccctggcgcagtcctggcgcaggtcagatcccgggtcggccaccttcaccttcgcggtcatgcaaccaccgctggccgcgatcagccgccgcgcctgggtcggtgagaccaccgggatcgtcacattgacctcgacgaggtcgcgcacgggggcgggcaacggccgggtggcggcttccaggcccgcatgcaaccagctcgcggactccgtcgcgccgtagtcccagaacggcgagcactccccccagccctgctcgccgtgcaggagcagcccgtcacgcacctcgatgcgacggaagcgatgcctcagcccggcctgaaagaccagcacctcgtcgatgccgcggcggcgcagcgcctcgggcacctgcacatgggtgagcgcggcggacttcatgcccggtcctcgagcggccgcgactccgggttggtggagcgccgccatggctcgggtgtcgtgtccaggccgttcagcacggccgacagcctcatcgggcgttccatggcgtagacgtcctccaacagcaggggcttgccgtctgccccgcacaacggcacccgccaattcgggtactggttgacggtgccgggctggttctggatgcgcgcatcgcccaccgcgtcgaccagggtggcattgagcacgcgcgagggggtccaggtgagcaccttgtacaacccgagcaccatgcgttccacgggatcgacgacggacggatcaagcgccccgcgcgactccaggtaggctcgccagcgctccagctcctggtcggccagctcattctcacgctccagcggctcggtgagcagcccgagccgggcgcgcagggccacgtgggccttcgtgaggtatccggcggtcggcggcaggtcgtgcgtgttgaccgacgccatcgtgagcgcccgccactgctcggcaggcaccggattgccctggtcgtcctcttcgaaccacaacaccgaggtgcccaggatgccgcgttcggcaaggtaaccacgggtccacgcctcgacggtgcccaggtcctcgccgatgaccacggcgccggcccgttgggcctccagcgcgaggatgccgaccatcgcctcatggtcatagcgcacataggtgccctgggccggccccatcccctcgggcacccaccacaggcggaacaggccgatgatgtggtcgatccgcacgccaccggcgtggccgagcgcattgcgcaccatggtgcggaagggggcataggccgaggcctcgagccgatcgggacgccacggcggctggccccagccctgcccgagctggttgtaggcatcgggtggggcgccgacggtcatgccgggggcatacaggtcctgcatcatccacacatcggcgctcgactgccccacgcccacggcaaggtcggtgatcacgcccatggccatgcccgcatcggtggcggtctcctgggcgtcggactgcgcctgcgccgccacccattggagccattcgtggaagtcgacctcggcgaggtgcgcctgccggaacgcccccacatcgggtgaatcgggatggcggaagcggggctcccaggtgcgccagtctcccccgaggtgttcgcacagcaccgcccaggtggcgaagtcgcgcagcatcctgccctgatggtggcggaaggcgtcaaagcgcatctgccggtcgtcgctgcgacctgccgaccagatgatcttcaacgcacgccgcttgtggtcccagcacttgtcacgctggatctggtcgtcgccgaccagttccccccgcagcgagctcagcagggcgcccacccgggcgcggtcggaatcgtcgaggtcggtgtattcgacgactgtctcgggacgcacgtaaatcgggttgacgaacagccggctcgtgggcagatagggcgacggctccatcggcggaatcgactcggccgcatgcacggggttgatgagcacatagtcggcctgttgctcggcggcggaccatgccgacagggcggccaagtcggcaaaatcgcccactccccacgattggcgtgagcgcacgctgtagagctgggcggcgtagccccagacccgcgagttcttcatgcgctcgggccaggccaggtgcggcggggtgatgatgagcgtcgcctcggcatggcggtcatcggagtcgaggatcagccggtggtagcccagcggcaggtcgccgggaagttggaaggtggcctcaccgatcatctgtccgtcgatgttgcggggcggttcccagttgtccacctggttggcgtcgcgctggccaccgtcctcaaggcgcaccaccagccgggcggggcgcccgtcgtgcacatgcaggttgacatagggcacggccccggcacgcgccacggtgacgggcggcaacatggcgcgccaggcctggtcgcggcgtgcggccagcgcgctgtcgatggcgtggggactggatgcatcgacgcccatagcgccgagcacggcgatcaccgaggcgtcgtccacctcggtgtgacggcccttccagtcccagaactccgtggcgatcccatactgctcggcgagttgcgccaaagcggcgtcactgtgcgccatggcccaatcccccctgaagaaaactgctcacatcattccgaccgtcccgacgctgcgcggcggccgaagtgccagctttccacgtgcaccgaaaagccccaaaccatggccggcaacggccatcaccggctcagggacgaatggagacgacctgggtgcgggccaccatgtcgtgccaggtctggcggcgacgctggaacagcggccacaggccgttgacgacgatcaggaagccgacgacgtaacttgcggcctggatgagcgcgtagacgccgttgcggatcagggccgtggaccaggacaaccggtagggacccgtgccgtggtcgaccggcaccacgcgcagcccgaacagcatctgtcccagtgtggcggcgaagaacttctgcagcagcacgctgtaggcgaagctgatcaccacgctgaccgtcagcaggatcacgaaactatggccgtactgcgggtcggtcggcaggggcacggcggaggtgttgccgctcgccgcggcggacatgatgtcgttccaccaacgctccatgccaccgctgatggtcgagctgaggagccacaacacgatcgagttgatgatgttgagcacgatgccgtcgacgatcagcgagccgaagcgggcccaccatccggccagtcgcacgccatcggcggtctggggcaccccatagggggtgaatccgccctggctgcggtagtagggcggcgccccggctgcgggatagccctgtggcccatagggattggtgcccggttgaccctgtgccccgacgggctggccctgcgggccggtcgcctggccatagggggccgccggctggccgtagccgccgggagcctgctgcccgtaggtgggtgcctgctgggttcccggcgcggcggggttcgccgcggcccgggccgcagggcccgcttgcggggcggccggcgccggcggacgcgtctgctcggtccaggcgttcccgtcccagtagcgctccagctggctgcccgccggatcggcgtaccagccggccggctgcaggcggcgcgactcattggtccagtccttgccgtcccagtagcgctgggagccggagtcagccgggtcggggtaccaccccgcggggggcagcgtcgggcccgaaccgctctggccgggttggttgtcaggctggaaggtggaatcgctcacgggcctagcatgccatgcgaccaaccgaaccagcgcccatggaacgcccacgaatccatcgatcgccgctacatggccggcggccgagcaggggccgccccggccggcaggccgcgagcggccacgggccggtcccaccaccgttcagcccgacggcgtggcggccacgcacctcaccaggacttctgggggcccacccctgccacgtcattgcgcacgggcccgatgcgcagcgccgagatgatcgaggccgccgagcaggtgacggccaccacgaacaccgatccgaagacgagctgccacgaatggcccatcaacgcggcgtagaacgatccggcgatgcccacgatcaccgagttgcccatgccctcggccacctgcagcgacgaggtggagcgtcccaactgggcgggatggctcagcgtcatcacggcaagcgaggtgctggccaccaccaggcccatgccgaacccgcccagcgcgtagccgacgatcaggatgaccagtggagacccctcgatggcgacgcaggcgagcatggcgcccaggccggccgtgttgatcacggcacccagcgcgatgatctggtcgcgtcgcagcctcagccacggctgcgcctggatccaggaggccaggcaccaggtggccgcgctgaggcacagcagatagctggcatgttgcaggctgaacccgcgggactgggtgagcaccagcagcagatagctctccgaggccatgaaggcacccgattgcaggccgcgcaccggcatcaccgaggccaggcccggccgcaaccggaagaacccggtgggcatcagggcgggcagcgccacgacgagggcggcgatccccaccaccgccacggtgatgacgatccagtcgatgcggtccacccggtgaccggcccactgcagcagtgcggccccaccggcacccacgccggccgcccagatcggcaccggtcgcgagtcgggcccgcggggggcgtcgaggtcgtcgaaggacgcggccccgtgtggcagctccacccgccgcagggagatggcccccagcaccacggccgccaccaggatcggcaacagtccccagaacacccagtgccagctgagcttctcggtgatcgccgcggcgatgggcggcccggcgaagctcggcagcacccaacagaatgagaaggcggtcatcagccgctggcgctgttcctcgccgaaggcctgggccaccagcaccatgagggccacattgagtgcgccgccgccgaagccctgcacgccgcgcatcgccagcaggaagtgcatcgacggggaggcgccggcccccagcagtccgatgccgaagatcaccgaaccggcgaccagcggcaccaccacgccggtgcggtcggccatccgtccgccgatcacgatggcgaagacctgggcaatggtgaagatggtgaaggcccagtcgtagaggtcgaggcggtggaactgaccggcgacggcgggcatcgcggtggccgtgccgtatgcctcgaaggcgatggcgagaacgcccaccaggatcgccacgatcagaccacgattgggtcgggtgcgggattcgccggtgcgggattcaatggcgttcgtcacgatggtccatccaatcaaaccgggcaaaccgatgggaagttcgcgggccaacccgccgtcggtgatgcgcacggccggtgacgaatgtgcggtgtcggaatgtcttgtgtgactgtgccaccatggaggcatgactcagttggcacccggctcggaaacgatcaccaaggaacgcacgcagcccctgcgcgaagagggcgacgaggagcgtttcagccactatgtgcccaagggcaagctgatggaggccatggtcaatggcactccggtggtcgccctgtgcggcaaggtgtgggtgccctcgcgcaatcccgagcggttcccggtgtgccccacgtgcaaggagatctgggagtcgatgaagccgggcaaggacaagggccccgacgcctgagccgacaccggcatcgctggcatcaggcactgatgcgggcgctgcccaacgcagaccgtgaatatcgcgaccccgctccggtggggtcgcgatatttttctgtcctgattcctctgtgctggcggtgccggggggcgcctccctcaggccactgtcaggccgtcgtcgggcgtgccgggtgatagtcctcgtcgcggatatcgggctcgaggtagatgtagcggcacatcggctctgcggtgcggatgttcacctcggcggcgtcgatggtgtcggcaagctgctcggcactctcgctggacgcgacgtcgatcttggcggccaccatgatctgttcggggcccacgtggacggtcttcaggtggatcacgccgcgcactccgggggtctggtccaaggccgccacgatggcgtcctccacctcgggcatcgccgattcgcccagcagcaggctctgcatctcgacgccgagcagcacggccaccgcgatcagcagcaggccgatcatgcccgagccgatcacgtcgaacaggccattgccggtgatcagtgtgagcccaacgccgagcagggcgaagaccaggccgatcagcgcggcggagtcctccaacatgaccacgggaagctcgggtgagcgcgagcgacgcacgaaggcgatcactccacgatggcgctggcgtgcctcatgggtctcacgcatcgcggtgcgcaggctcagcccctcggcgatcaggctgactcccagcacggccaggggcacccaccaccactgcgagctgagcagctggttctcctcgccatgcgcgacgtcgccgatcttgcggatggcctcgtacagggcgaacaggccgccgaccgagaagaggatgacggccaccaggaaggcgttgatgtagcgctggcgcccgtagccgaagggatgggcgcggttggcctgcttcttcgcctggcgtccgccgatgagcagcaggatctggtttcccgtgtcggcgaacgagtggatcgcctcggagagcatcgaggccgccccggtgagcagccaggccaccagcttggtgatggcgatcgccaggttggccgtcagcgcggcaatcgtcgccctggtaccgccatgctcgcccgacgcgggctgcccggttgccggggacccattcgacgcggactcgtccgccacggattcggctgcttcactcatctgcccgacgcctccatcagctgtgcacgtcaccttcatgaaagtccacatccacgggtcggccatccgccgccagcccgtggacgcgtcagtggaccggacagggggcgactacgcgcccagtcggcgtcccaggccgatcgacaggtaggcggcgccgtaccggccctgctgcagcagcgagacatagcagtccaggtcggaaccgcgcccggcatccagcgtcaccacgcgcacatcgtgcgcccgcgcggcggcgaccagccgctggcgttcgacgtccatctccggggagttggcctggtcgtccaggatgatcagcaccggacgcaaggccgggccggcaccggggtcggcgaaggggtcacgcggtggggccccctcgatcaccaggagcagttcctccgagccgctggccagggctgcgcggccactggccctgcgcagcgcctcggcgacccgtcgtcccgcgcgggcggccagcaccgatccgccccacaccaggggttgtgcatcggccagtgccacggccaggtccttggccgggttgtcggacaggtcacggaagggactcgcgttctcggcggccatgtcggcgacctcggcggtatcggcgggcaccacctcgggaccgagccggatgtcatgcaggatcgacatcacggcgatggccgcggccagcggatcgcccgtgcgggtggccaccagctgggtggccgagctcctggcggcgcgggccaccagggaatcctcctcggcagccacgatcaacgccgcaccgcgcttgacggcctcacccacggtggacagcagcgaaggatcatcgccggcgcccgaaccgagcacgatcacgaggtcgagggcacccacccaggccggcaggccggcgaatggccaggccacgaacggcacccggctggtgggttcgagcacggcccgcaccaggcgggcctccttgccgacggtgaccacgccgcgcaatgacgacaggccctgcgagctgcagggcgtcaccgccgcggcctcggtgcggatgcgtgcgcccaccgaggccagctcacgcatcaacgtgtcggcaacggtgagggcctgcggatcgtcgagggtcgaatcatcgaagtcgctcatggaggtgtcagatcttcttggtggaacgggcctcgtcaacgagcaggatggggatgccgtcgcgcaccggataggcaagcccgcacaggctgttcgtgcaggcaagctcgctgtgctcgtagtccacggccagcttggagtggcactgcgggcaggcagcgatctccaggaaggtggtcggcatttccaactcggcggtcagggccatcgttgtgctccttcattcctttctgcctcaggtgatctctgatgcgccgattgcgacgcatcaggcggacggcaagagctctaggtcagcgggcttgccggctcgcagggaaggaatcaacctgtgcagatattcaagagtgtcatcaggcccggtcacggcgtggcagggcacgccgagggtgagcacggggtggtcattgccacccggctgcaagcggtcgccgatgaacaacatgtcgtgcaatgcgatgcccgtctgctccgacagggcccgcattccgtaggccttgtcgatgcccttgcgggtgatgtcgatcgaggtggagccgccggcccgcacctccagatcgggaaggtcggtggcgacggcggcacgcagcgcctcgcgcttggaaccgtcgggatcccacgccttcttggcgtcgacggcggcgttctggcccagtgccgagtaggtgatctgcgagccgcggtcctccacacgggggccggtgacgatgtcgtcgggctcccacaggtggagctgcttggcgcgggcctccagcgacgcgatcgcctggtcgcgttcggcggcatcgaggtcgtgcgcataggcctcatgccagccctcgccggtgaagcgctcgtagcgggtgccgcaggtgggcatcaggtgcaggttgcccagtggcgcgtcggcgggcatgcgctccagcacctggctgatgaactgctggaagcgtccgccggagatgatgcagaccggacgcaccgcgagcagttcgctcagtgcccgggccatgggacgcggcagcggcgacttcgacggtgcgagggtgtcatccagatcgaaggcaaccagcgccggaaatgccggggaagccgattcagtcatgccggccagcctaatgcaccggggaacccgtgcccgggcctgcggaggtcccgccgggcgacgacggtggtgccgccgacatcgcggtgcgacgagcgaatggggtgggtcaccgtcagcgggcccgcttctggtcggcgatcacgcgcaggtggccacggtgggccagctccacgatccccgattcgtcgggttggcgcaccggggccggcgcgggcatgggcgcaccgcccaggccgatctcacgcacggcgttggccagggccagcaggtcgtcatcgtcatcgggtaccggcacggtctccgcgatgtcggccagccggatgatctgccagccacgcggcacgctcagggtgcgcgcgtggtcggcgcacaggtcgtaggtgcccggctcgacctcgccggacaacggacccaccactgccgtggaatcgggatacgaaaaggtgagtgtcgccacggcgcgctcactgcaactgttccgggaacaacgccgagccttcacccgcacaaggttagccactgcggtgacaaagcccttgtcacgacgcgcccccgccacccacgtgtgccttggaacgcgtgtcccgtggaacgcgcgccccgtgaaacacacgtcgtgcgcctcacctgtcgttcgccacggccggccccaccgtggcgaacgcctaggcttgggagtatgcgtactcgcgaccgtcacggacgcggcttgcgcgggccgctggccctgcccaatccgtacacccaccgccccatgccggtgccccaggcaccgcgtggcacccggctcttcctggcctgcgtcgaggatgccattgcccgggtggcgtcgcatgcccctgatgtgattcgcaatgtcgacatcggcgtcgacgaggtgcccgacgtgcgggcgctgtggagcaacggcgactacggtgacgccattccgctggcctccgccacggacgcacagccgggtcagaatgcgcgcatcgtgctgttccgccggcccctggagcatcgggccgccgatcagtcgcagttgcgcgaactggtgcatgagacgctcgtggaccagctggtggccctcaccggacgcagcattgacgaaatcgatcccgatgacggggaccagtagcgcactcgtgtccgcctgcacgggcccggcgcccaccgcgccggccatgcccgtcgggcattgagcggactccgccggggggtcagcgctggagcaagccccgctcagcggcccaggtcgacggcgggccgcgccgccagctcgccctgcgttgcgcggatgggttgtgccgggatcagggtcagtccggtctgtgtcaccgcagcgccggccacgaagggtccgccggtgctgatctcggcggttcgggcgtcctgcggggtgaacaatgccagcgtcgcctgcgcggcgatcgtgcggcgcagcggggcctggccggcaccccagttcaccgtcacctcccgtggcccatcggccaggttcgacacgatcaggcgcgccgggccaggcagggccaggccggctgaatcacccgaggtgatcgacgaatcggtgcgtccggccagcaggcccacgtcggtgccgagtgtcaccacggcgctcacggcgatgttgctgcgggcggtcacggtcagcgcggccgattccgcactgactgatccggagacatcgaccgccaccgtgcgctcggcctcgatgaggatcgtgccgttgccggggtcgaaggagccggactcccccactgcggagatcttggccgaggtgcgcacggtgtccgggttggtcagcagcagggtcaccttcgaggcacccgagggcacggcggccaccgtggaggtgcgggccaggccggtgctgtcctggtagtcgagtgcacccgccgagccggagcgggcgacggcggcgacgcgtccctgggttgcccggatgcgggcacccacctggggcaggccccgaatgcgcgccgacaggtcgagggtggcggtggtgtgcgcggggacgcgcacgtcacgcaggtcgtcggcggccagtgctccctgcgggccggtcagggtgatgctgaccaccgcctcgaagttgtcggggttgctcaccaacagggtggcctcgccgcccggcacctgcaccacctggtcggtgcgcgattccgcgcacgggctgaaccagctcgcggcaccactgaccccgtagacgccgcctgatgcggcagcctgcgtgtcggccggcgagatgcgctcgctgccggcaccgacctgctgcgacagcgggctgtcgagggtctgggtggaggctcccgagacgcgcagctgcccctggctggcggtggccagcaggctgcccggctcggtggccgcacacgacttggacagcccgatgctcaccggcacggaggcgggcgcgggcagctgggcgcgcggcacgatggcgagcaccgccagcagcaccacgaccgcggcggccacgatgccgagttcgcgcaggcgcaggcgtcgttcgcggtgggtctcacgctgccaggcgtcgcgttcggcgaggtctgccgccgttccgggtgcggcccggcgtccggggctcatgattcagccgcccgtcgtcgcgccggtcgcggcgcctggtcggggccggcgtcgggaatggtgaagccctccgggtcggcgatccgtcgggccgggcgggccggggcacgggaggccaacgcccggcgcggcgcattggtgcgattcgtcgccgccggggcggccagcaccatggccaggaccagcgcgatcacctgccaggcgcatcccgcccagcccgtggcggcgtgccagctgaccggccccgaggcactgcccagcgcgaaggactggcgccagtcgccgctgtcggcgcggcgcagctggtgcccgtcaaccgtcgcatgccagcgtccgctggccggctcggcgaccaccaggagccggtcgccgtcaccgggcgggacgacaccggcggcgggggtctccttgccgtcggcgcgcaccacggagcgggccacgggctcgttgagcgtccagacggtggtgtcctggtcggccacggccgcggtcattccgggggtgtcggccagcgacgacctggcctcgggtgaggcaccgcgtacccacacgtgtgccacaccgagctgggcgaggcgtgccgccatgtcgtcagagggtgcgccccgggcgatctggcgggccagcgacgacacctgctcgcgcagccggggatcgggcgagatggcgtcggattcgccgccaccccagtgcggggatcgcgcgtcggacagggcgtagcggacggtgccctgattgccctgcgcgtcaatctgcaccatcagcgtgcgggtatcgcgtggcgagttctccaccgcgtcgacgtagctgggcaccggcgaaccggcacgatgcaggctgccggtggcaccgccggcgacccaccacacggagccgatgagcaccgatgcggcgatcaggaggccctgcgcgatctgggctcgggtcaacaggcggtccaggggtcggtcctgggcgcgctcaccgtgcacgggcacgggccgtccgataccgaaaccggtcagggccagcgccacgaagactgccgccaggtaccactcgacgccggtgggacgcaccggcgagtcacccagggtgaccaccaggtgcggcagggcacaggccatgaccagtgcgccggcaccggccagggcgatcaccctgcgcgtcgtggcatccagctcgtcggctggggcgcgcaggtagccgatcacggcgccggcgccgaccagccccaggaaggcaagggagacccaccagggcgtgttggcgcccagcccgcgtccgaacagcagggccaggggtgacgctgcgtcggccgcgacggcggcgctgggatcaatgccggtcagcacccgacccggcgtggtgaccagcctgatcagccagggcgccacgatcacgaacggaccgcccagcgccacgagcgccccgcgtcggtcgtggcgggcgtgggccagcccgccggccagcaccagcgatgcgagggcgagcgcggggaagaacatggcgatgaggcccgtccacagggcgacggcccccggcgcccgccagccctcggcgccggtgatcggtcgctggcgccagcgcagcagcgccgtgcccagtcccggtaacagcacggccagtgccaccaggtcgatgctgccctgcgagatggctccacagaccggcagggccaggccccaggccaatgccaggccgttggcgaaccagccgcgcccgcagaccttggcgaacaggtgcgacgacacccaggtggccaggccgaccgagcaggccaaccacacgaagatgaacagatcgggcttgcccagggccagcgtggaacccagcgccgccagtcccagccagggggcgttggcgccatgggcgcccggcaggggcactccccaggccgcccaggcctgtgacagctcgccgggcgccgggagcagtcgggccgcgaccagtggatcggagccgaacagcccgcgcaccgccagcaggctggtcaccacggcaatgagcacggtgagcagtcgtgccgacagcacccggcgggtcaccgccacgttggcgtagtcgctcccggtcagctcgtcgaggccggagccgccctcgtcgttgcgcagctcgtagacggcgtcacccatccgtccggccaacgtgtccgccgcgtggcgcacattccaggcacggtcgggcagcaccccggcaggcagcaccgcatgggcggaggccgggccgaccctgtcagccaggcgttgggtctcatcgcgggacgcccggagctgccgcagggcacgcagttggtcagcagcccgtcccggtgactttccgatcacataggccagggcggtgccccatgagctcgccgtgatggcacgggaggcgcgccccggatgcggcgagtgggcgatggccacccgcatgcccgccacggcgtcggcgatctgggcgttgggcgccacctgcgagtcgcgcagacccacccgtccggcctcccgatggcggaaggctgcctgagggcaggagcgcacgacgagtccggcctccagcgcgcgccatccgaagtcgaccccgtcccggtacagcgggatcgccgggtcaagtccaccgagctgccgccatgccgccaaccggatgaacatgccggcggtcgaacccccgagcaccgggcccgcgtcgagttggtgctggtcgatgtcgccggattcgacgctgggcacgcgggccccgttgggcgcgatggattcgcccagggcgctcatctggtcggcatggttgcgcagccgcggatgcagcagcttcggcaccaggacgtcgggagcgggcatgccctccggtgggttcgcggcgcgcaggagattgtccagggcgccgtgttcaggttccaggtcgtcatgcagcagccacagccattgcggtgcgttctgaccgtcctgcgatggtgcatcgaggtcaagggcgcggtgcaccgacgcgccgaacccgacatcgcccgggccgctgtaggcggcgtcgaggatgccctcgtgcacggcccggttgagcaaccgggcggagtcgtcgtcggaggcggcatcgagcgcgatcagacgtccgggacgggtgcgcaggccggcaagcgccaccagggtgcgcggcagccagtccgcgccgttgtgggcgatgagcacgccgagcacggcatcggcgccgtgcggggtggcgggtggattgtgggggcggtgcgcccaggcccacggatcccggtcgtcccgggaatgctcgtctggctgagtcacgcgccacaccctaccggtgcccgaccgggccggccacgcggtcggcggcgaattcggccgcctggtgggggccggtgggtgatggcccgcgaggcgcgggcggttgcgcggatcgaaggccttgtcaggggcgatcacggtgcgccggcgggacgattcccccatcggtggaagggtcccgggcacgcgggggtcagctggcttgggtcctcaggcgacggcgttcgcgttcggacaggccgccccagataccgaagcgctcgtcgtggtcgagggcgtaggagaggcactcggtgcgtaccgggcatgactggcagaccttcttggcctcgcgggtcgagccgcccttctcggggaagaatgcctccgggtcggtctgggcacacagggcgtgttcacgccagctcagtgcgtcctcctcgctcgggtcatcgaacgacggcaactccagcatcacacttccctccgatcaatggccgcacagggcccaggcgatgaaccatcgccgccctgagggggtttcgcgcctcggcgggagcgccgggaacgaactacacagttggaattacattccctgacggagcgaaggtcaaatgagatgccagtcgccgcgcccattggcgtcgagaaatttgacagcttttcacggcgtgtctcgcacccgcgcaagtagcacgtcgaggggacggcgtcacttcaatgctccgcgcgtcggcacatctgatcgctgacagctgaattcatcgggcggtgccacaccccatggggattgggcccgggaccggctcaggagtcctgcgcgggacgccccgggtcagcgccgtgatcctcgtcgggctgttccagctgcgcgccgtcggcccgttcccgggcggtgaaggtcaccggtccggtctcggcgctgttgtcgggcatcgcggagggatccgccgcgtcgagcttgatcagcgagggggtccggggagtcttcccctgctggggagcagcgggcggctggggggacgacggaccctcatccggggcctgcgcggcagccaccgatgacggtggccactgggtgggcttcggtggctgggccgccggctgctgtgtcacaggttgttgggccacaggttgttggtccgcggattgctgagcgacgggctggtcctggtcggatgtggcgccgggcgctcccccgaacaccgacgagagtccctgcatgccgcttcgccagtcgggcggctggcccggactcgtcgcgaagccgcctgcaccgggggcgacccccaccggtgcggcaggggtgccgggatgagcccactgatcaccgacggcctcctccgcctgccacacgggagccaggcccggctcgggcgcggtcacgaccacgggagccttcctcggacccttcagcaccacggacatccgccacaggaagagggccaggacggccttcaccgacattgccaacagtgcgccgatgatctccagggcgatcgatgagaaggtgcccccgccggtcaggtcggccaccagcaggaagaggtcgtaggccaccacgacgctggtgaccagtgcggccacccgcgccaggagcttggcatggccggtggccggcttgatgtaggcgcaggcgcagacgagcagcaccacgagcacgagccagccggtcgccaccgacgacgacagtgcccgcgccgcgcgcccgaagcccatcccacgtcggaacaggttgaggaggatctcgaccacgccgcccaccaggaatccaatggtcagcaggatggacgcccaggtgatgggttcacgccaacgcagcagtcgggtgccccacggcacgcggggcaccttcggggtctggtccacggtcgatatctgctcgctcatgccagctccgcatccacctcatgggcgactcgtcccaccagtgtcttcacctgctgggagtccttcagcgggcagccgagggtggcggccgcggtccgcaccacggccatgtcgcgaagcccggcgacagccagcaccgaatcgccgacgtcggcgttgatcagcaggcagtcgtgcgtgtcctcggcgatcaccgctccctgcacaacgttgccatgtgcgtcatggggcagctccaggtagaggctggcgaagctaccgacgtccgcccagcgcgtgtcgagggccaccgcgacgacatgggcctgcgccttgccctggctcaccggctccatcaccccatagtccaccgaggacttgaacagctgcggatagatcaccgccaaccgttcgggatgagcggccagctcctgcaccgcgtcaaaggtctgcggcaacagcaccttcaactggcgcaacagcgtctccacgcgccagacgaacatcccggagttccaccaatagcgtcccgaggccaggtactgggccgcggtcgcggcgtccggtttctccttgaactcggtcacccgcgagacgtcgacgaagccgggcacgtcggtgccccggtgcaggtatccgtagccggtgttcgggctggtgggcacgatgccgaaggtcaccagggcgtcggcgtcctgttcagccacccggaacgcggtatcgaggcgttggcggaagacctccaccggctcgatgatctgatcggcggtgatcatcgcggtgacggcccccgggtcccggcgcgccagcacggccgccggccaggccacggcattgagggaatcgcgtcccacgggctcgcccagcagattgcgggattcgacctcggggatctgccgggcgacctcgtcgatataggcggcaccggtgcagatgaggatgttcgcggggtcgacggcgcccgccacgcgctcgaaggcgagccgcaacaggctcttgccgtcgatcatccgcagcagctgcttgggctcgccctgacggctcaggggccacaacctggtgcccgaaccgccggccatgatcaccgcatatctcaccggtccaccttatcgggcgaccccggccatgcccgtcaggaggatgccccggcccgtcgcgtcgtggggcacagcgccggtggtttcatggcggggcgcgacgcacgaccggtagcgtgtcgcccatggccgaacagaatgacgagggtgggcagaaggctgaccttgactggctgtatcgccgcgggccggaagaggctcccgatccgctggcaggacgcccggcacgcgtgacgagcaccttcaaccgcgccgacgtccagcgtcatgagcaggagttcctggccgagcgcgcacgccgccaggcccagcagcaggcccgcccggcccaggcccagcccggtgggtcggcacagtatgtgagtcgcggacagcagcccggcgggtatggggcagccaacgccgtgtcccgccacgccggctccgggccgaccggcggcggcaatggtgccccgccacgtcgtcccgtgcccgcccccgtccccgccacgcggcctccccgacgccggcgcccgcgccatccggtgcgcaacttcttccgcaccttcttcatcatcctgctggcctggctggtctatacggtcgcggttccggtgcgggccttcgcctccatgccccaggtcgactgggaaccggccgctgccggtcgtccgtcgcagcagccgggtacggcgatcctgctggtgggcagtgactcgcgcgagcacctcaccgaggaacagaaggcggccctgggcaccggggacgccgagggccagcgcaccgacacgatcatgatcctgtacaccccgccgtggggcggccgttcggtgctgatcagcgtgccccgtgactcatacgtcacgatcccgggctacgggcggaacaaggtcaacgctgcctattcgttcggcggcgcacccctgctgacccagacgatcgagggggcaacgggcctgcgcatggacggctacatggagatcggcttcgccggcttcgccggcatgatcgacgccgtgaagggcgtgcaggtgtgcctcgacgagcccatggccgacccgctggcgaatatcgacctgccggccggttgccagacgctcaacggcgacaatgcgctgggctatgtgcgccaccgctacggcgaccccgagggtgacctgggccgcgccaagcgccagcgcgaggtgatcgccaaggtgggcaagaaggtgatgtcacccaccaccgtggccaatccggtgcgctggtggaatgtgaatgaggcactgtccaaggcgatcacccgcggcaaggacatgggccccggcgtcgccctgggagccggacgcggcatggtgagcgtggccggcggcaagggactgactttgcaggtacccgtctcagactcgtccggctggtcggacgacggccaatcggtggtgatctgggattcggcccgggcgtccagaatgttcgggctgctggcgcagggcgacaccaaggacatggaccagttcgccagctgagcggcgaccggcccaccgggccagccgtcctcgaggcctacgggcgcaccttcttcgaacgcactgcctcgcccttgcgacgcgcggagtccgccaggtcgtgctggaactgcaccatcttgtccgtgagcgccgcgtcgccggccgcgaggatgcgcacggcgagcagcccggcattgcgtgcattgccgattgccacggtcgccaccggcaccccggccggcatctggacgatcgacaacagcgagtccatgccttcgaggttcttcaacgccaccgggacgccgatcactggcagcggcgtgaccgctgccagcatccccggcaggtgggccgctcccccggcgccggcaatgatcacgcgcagtccccgctcatgtgcccgatggccgtaggccagcatctcgtcgggcatccgatgggccgagaccacatcggcctcgaagggcacgccgaattcggtgagtgcctctgcggccgcctgcatggtgggccagtccgagtcggaacccatcacgatgccgacgagcggctggtcgtcgcctgcggccccggatgcctgttgcgcccctgcgccctgcgcgtgcggatcactcaccgtcgtcctccatcacgtcgtcgtcacccatcaggtagtgggccgcggcacgggcgcgctcctgcacgtcggccaggtcggccccgtaggcggtgacatgggccatcttgcgtccctgacgccatgccttgccgtacagctgcaccttcaggccgccatcgccgagcacggtgggcagtgcggccaacaagtccttgcgggccccgcccagcacattgcgcatggtgcaccacggctggcgttcctcggtccaaccaaggggaaggccggcgacggcgcgcaggtgattctcgaactggctcgtggtggcaccgtcgatgctccaatggccggtgttgtgggggcgcatcgcgagttcgttgatcacgacctcgccgccgggccgctccatcagctccacggcgagcactcccaccacgtccagttccttggcgatatgcagcgcgagggcctggatctcggcctcatggtcactgctcatcatgggtgccggggtggtggtctccacgcagatgccattggcctgcacggtctcgctgaccggataggcgaccgcctcgccgtcgggattgcgtacggcgatcaccgacagctcccgcgcgaagtcgacgaactcctcggccaggatctgcacctgctccccggcgctgaccgccagcgaatcggtgaagggaatggaggccgcgccgggaccgtcgagcttccacacgccgtggccgtcatagccgccgcgcgattccttggcaatgatcggccaaccgatctcgttgccgaattccgccagcgcggcggcgtcgtcgcagatgcgccacttcggcgagggcagtccgagctcgtcaccaagcttcatgcgcatcagcgccttgtcctgcgcgtagaccagcgccttggggcccggacgcacggccacgccgtcacgctcgagttcgctgagcagctcggtgggcacatgctcgtggtcgaaggtaaccacgtcgacggtcctggcgaaggccttcaccgtcgcggggtcggtgtagtcgccgatcgtgacgtcgtggatcacctccgcggcactcacatcgggaccctctgccagcagcttcacctcgagccccaggccgattgctgattcatacatcatccgggccagctggccgccgccgatgatgcccaccgtgtgcacagattccacgcctccagcctatccggcgcgctcggaccggcccgcgcgctcggtggacggcgtgagatcatgacgtcatgagcactcacatcgtggcaatgggtggtggcggcttctcgatggcgcccaacagcgcccccaccagccttgatcgctatctggtggacgtgtccggcgagcgttcgccgctggtctgcttcgtccccaccgcatccgccgattccgcgccctacatcaaccgcttcctgatggcctattcgggcctgggcgtccgcacgatggtgctcaccctgtggcagggagctgccgaatcggtgaagcgcctgccggaagccgacgtggtgctggtcgggggtggcaacacggtgaacatgcttgccctgtgggacgcccacggcgtctcccgcaccctgaagctgatggctgccgacacctcccgcaccatggtcctgggcgggctctcggccggcggggcgtgctggttcgagggatgcctcaccgatgccttcggcgacctgcgcggctggcgtggtgggctgggaatgctgtcgggcagcttctgcccgcatctcgacggcgaggatcgcggggccatctacacccaggcgatcgccaccggcatgctgcccgggggctatgcggtggacgacggcgtggccgtgcacttcgagaacggcaagtacaccgacgtcctggccgagcgtgagggccccacggccctgcgcctgatgcccagcaccgagcccacggccagcggggtgctcaccgagatactggagccggaagtcctctaggccttcccggaacactgggccggaagtcctccgggccttcgggggggcgctacctgcggaaggcctcgaccagggcccgcacggcacgttccaggccggcggcaacctcatgggagtccatgccggcctccacctgcttcatgcaggagttcaacagccccccggtcatggccgcgcccaggcgcgcattgggagcggagatctgcgcccatgcctcccccagcccggcgaacatgttctggtgggcctggttcacggttcctgcggcctgctggttcaggcgcttgtcgcccaccttcatcaaccagccgtggccggcgatggtggcctgttccaggttggtgagcgcccaggccacgatctgctgggccgggtcggacgtggcgtccatggcctcctggacggcccggaaccacgctggcatgtagcgctcgaccaccagcccccgcaggtcgtcgacgctgtcgacatagcggtagatggagttgcgcgcgacaccggcccgcgcactcacggcgctggtggtgaactggtcggggccctcgtagcgcagcacctgctcggctgcgtcgatgaggctcgtcaacaccctttcatgatgctctcgcaccgtgggggcattgatcttcggcatggacggccctttctcgatgcccgtcgagcgggcacacccttggcggacgggaacatgacccgcccactcaaccgtagcggctcaatatggcatgtcgggagcggcaggacgcgactccgcgaccagctggctgacggcctggtgcagggcaatcacctggggcattccgatcagctcaaggcgggcgcccgatgcggtggtgacaaccagcgtgccgctgccccacaggcgatcgagcagcccccgcgcataggacacatcggtgatccggctgtaggggaggtcgctgcggcggcgtcgcaacagcccggcgcgcaccacgagccgtcggtcggtgaagccatagcgggtggtggcccaggccaacaccggacgcaggacgaaggcgatcgccagcgccgcggtgatgacggcgatcagccaaccggcccacggctccaccgccgccggcaccatggccagggccacgccacaggccgccgccagggcgaacaggaagaccacgggcaccacgagcgccttgggatgagcacgcagatcggcaatgacggtctcgtcatcgcccaggtgtcgtcgccatcccatgggtccattctggcagcagcgaccccgatcccctcagcgcaggtgcaccacatcaccggcggtgagcacgcgccgggtgccctggtcgtcgtccacgaccagcgccccattgcgatcgacgccggtggcgacaccggtgatactgccccggtctggatgctcgaagtcgaggtgcacggtgacgcggcgcccgatcgtcgcacagacccgtgcatactcctcgcggatctccccgcggcgctgccagacggcgaaccagtggtcgagcgcctggagaacggccgccatgagcggcgtcttggcgtgcggcagcccggccagcagcagggacgttcccgtgggcaccggcagttcctcctgcgacatgctcacgttcaggccccacccgagcacggcccgatcaccgacccgttcgctgaggatgccgcagatcttgcgctcgtcgagcagcacgtcgttgggccacttgagcgtgacgcggccgggcaccgcacccgtgtagttctcgacgccctcgcgcaccgcgacaccgaccaacaggctgagccagccccactgcaatggcggcggcgtcggcgccaccagcaccgaggtggccaccgaggtgcccgcggtgtcctgccagacgcggtcgaagcgggcccggccacccacctggtgctcgctcatcaccacgagtccggtggcggcacccttcttggccagggcgacgaggtcatcgttggtcgatccggtttcggggcgccactggatgggtccccaatagctgttcttccccagcaactgctcgagctcgacggggtcaacgggcgcggtggtcggcatggctcattagcctaggcccggcggtcacgacgcagccgctcccgcgggcgcacgtccccggttccaatcccgcgacgaacccacctgcattggcccacggcgccgataacagcgacttgcgcggcgtccttgcggggattctgcactgagtgaatgatgatgtggtgagcagcatttcgcagaggaccaaacgggccatccgcgcggccgcgctggagctcgccctgcgcgatggcgccgacaaggtcaccgttgaccagatcgccgtggcggcgggcgtatcgcgccgcaccgtgttcaaccacttcgccaccaagtacgacgccttcatgcctgaggtcgccgcctactcggacagcgccctgaaggacttctccagcgggcgcgaacctgacctgatcagggccctgggagacgtcatcggcaaccgcatcgaccaggtgcagttcaccagcgaccaggtgcgggcggtgcggaagctggcccaggacagccccggcctgcacaatgccatgcgcggacgcagcggggccctggatgcccgcctgcaggccgcggtgatgcgtcgcctcggcagcacgcccgacgacccgagcaccacgatgacgctggcgctggcccgcagcatctggcgcacgaccctggatgcctggctgaccacgcccgacgaattcaaccaggattcgctgcggcgctgcctggcgaagtcgatggagacgctcgaaggcctggtgcgctccaacccgggcgcctgacccacaaggtcgatcaggactccgcgggcccgtcgtgggggtccgcatcgtccagctcaccaaggctgcgcagcagttcctcgcgttcggccggccaggcggccatctcgcgctcgatgacgtcacccagcttggtgaaccacttggcattgagccacagcctgcggcccgctggcgtccccaccccgccggcggcacgcgaaccctccaggaacagtcgcttgctgccctcgatcacattgctgcgtcccagcagggcgtcataccagtcatcactgctcagggcgtgcaccacgcggcgacttccgggacgccgcaacctgcgggtgaatccgatgtcggccaggtacttcgtcgcccctgataccgccgccggcgaaacgttcagggcctgcccgatctgctgggcggtgagctcggcatccggctgggccaacaacagggcgaagacatagccggtcagtcccggcataccgctggccgccatgaggccgccgaagtgcgagacgaactcggagatcccctgctcatcacgcggttccgacggccctgcggaatcctgctcgccctcagcgtgcgtgctcactgccattggccctcccgacatccggtggcctcccgacgtccggcgtcatctgatttcagaactttcactggttcgtgaaatggatgcagattaacacgcacccgcccctgccggcccgactcagctcgtgggcgaaacctcggggttcgacccctgcgggggcacctcacgcatcaggcgccacatccggatggccacgttcaggtgactggcgaccatcaggccggccacgatcaaccagaagcccgccacgccccagtggtagatctcagccagttcccatgtggcttcaagggccatcagtgccgcgccacccgcgacggcgaaccacccggtggcacggttgacataggacgtcagcactgagcgcgcccgctcccgtcccgaaccacgctcccagcgacgaatgcgcgcccgcgcagcgaagtagtaggccggcggcgacaaccacaacgcccgatcggccggcttgagcttcacgtcaccctggcccttgcgcccgatctcccacagctcgatcgcgccctgcaacaggggcccggcaaccagcaaccaggcccccaggaagcccgcccacgtcacaaagatctgcaccccgccatcatgcacatcatcggcgaacatccgccgaacggccatccccggcaccctgtcgggacccctgtcccccggccacatgggccttcgggagaagacctcttcataacattcacactttcgtgaaatgtgtgtagattggccccatgagtcctactcgggcgagtacagcgatcgagatcaacggcctgatcaagaccttcggccgggtcactgccctggacggggttgacctcagcgtgcagtccggcgaggtgcatggcttcctcggccccaacggagccggcaagtcaaccaccatccgcatcctgctcggcctgctgcgcgccgattccggcagtgcacgcgtgctcggcgccgatccgtgggccgatgtgcgcaccctgcacgagcgcctggcctatgtgcccggcgatgtgaacctgtggcccaacctcaccggcggccaggtgatcgacctgctcgcccggctgcgcggtgacctgaatccggcacgccgcgacgagctgctcgaacgcttcgatctcgaccccaccaagaaggcccgcagttattccaagggcaatcggcagaaggtggcgctggtggcggcgctcgcctccgatgccgagttgttcctgttcgacgagcccacctcggggctggatcccctcatggaggccgccttcgacaccagcgtccaggagctgaaggggcgcggggccacagtcctgctgtcgagccacatcctgtccgaggtcgaggagctgtccgaccgcatcagcatcatcaaggccgggcgcatcatcgagaccgccacactcgagcagatgcgcgccatgcacaccacctcggtgagcgccgacgtgcagcgcgaggcaccggagctgggcaccatgcccggcatcagccagctgcggacggtcggcggccatgtcagcttcgtggtggacgccgcccacctcgaccaggccatcaccgtgctgacccgcgcggggatcacctcactggtcagcgagccgcccagcctggaggagctcttcctgtcgaagtacgccgatctcgtcccgacgggcaccccggcagcaccgagcgccggtgaccagcggtgagcaggcagacattcgccacgcgccgtggtcggggcgcggacgccacgcggcgccggggcagcggcgtggccagcctgctgcggctggcattgcgacgtgaccgcatcctcatcgccgtcacgctggtgttggtgtgggcgctcaactactactcggccgaggcaatgggcagcctctatccgcatccggccgacctggtggcggccaatacggcggccaacgcctcaaccggcgtcgtggcgatgtacggccacatctccgatgtcggttcggtcggcggggtcgggtcaacgaagatggcgatgatcaacttcatcatcctggccttcctggtggtggccctggtgcgacgccatactcgcgccgaggaggagacgggacgccaggagctgatcggctccgccccgatcgcccgccacgcgcccctgacggccgcggtgctcctggccggtgccgcgtcggtggcatgcgggctggtcacctggctgtgcgtctgggccggcggctggccctccgccggctcaatgctctatggactggcgctggccggcgtgggcctgtcgttcaccggcatcacggccgtcgcggtgcagctgtcggccaacaaccgcacctgcggcatctgggccttctcggcgatcgggctgtccttcgtgctgcgcatgatcggcgatgtctactggaaccggcccgcccacgtgctgtcgtggctgtcgccgttgggctggggacagcaggtgcggccctacgacgggaaccatgcctgggccctggtggtgccgcttgccttcttcgccgccaccgtggcgctcgccttcgtgctgctgtcgcaccgtgacctgggtgccggcctgttcgcggaacgcgccgggacggcccatactcgcatggacagtgcggccgcccttgcctggcggttgcaacgcggatcattcatcgcctggcttgcctgctatgtgatcttcggggcactggccggcggcatgtcgggttccatgcagggcatgatcaacgccgacggcgaggcgatgctgcgcgccatgggaggcgtgggccacctcaacgacctctacttcacgctgatcagcgccttcgccgccctcggtgccgccgcatacggcgttgcgacggtgctgcggatgcgcagcgaggagagctcggggcacctggaacagttgctggccactcccctgacgaggacgaggttcgcggggtcctatctggtgcaggccgtgctcggctcggcggtgctggtggcactgctgggcgcgacggcggccaccctgcacaccacctcacccggcggtgggggctggtggcgggtgttcagtggcgccctcatcgggctgcccggcatctggctgctcacggcactggccttcgtggcactcgcctggcttccccgcctggattggctcggctgggcattcctgggctggaaggtcgtggtcgacgagttgggggcactgctgaagttccccggctggctgctcaaggcctccccgttcgcccacctgccgaagctcccggtggagccgatgacctgggcgcccgtgctcgtcatcaccgcacttgcggcggtgctggtggcgattggattcgtgggctaccgacgccgcgacatgccggtggtctgaggcgggtccgactcatcggacagcgcgtcggccagtgccgcccggtcgtccaaccctccggtcgaccaatcccactcgcgccggtggacccacccggtcggccagcatcactcgtcggagggcgccgaatagtcgatgtcgcgcttggcgaattcggcgtcgctgctgaggaaggcgtgtgggctgcgccgccagcgcaccatcgtccagcccggatcggtgcacatgcgcgcgacggcgagcccggcagccagcgccatcacgcccaccagggcgtcggtgccataggccagtgactgggtgatgtcgtgggcgttgaaccagtacatcgtgcggtacatcgacgtgcccggcaccatgatcaccgcgccggggaccgacagggtgatgcgcggcaggtcattgttcttggcgagcatccaggccagcatgccgacgacgaacccgcccacgaggctggccatctgggtgggcatgccgatgcgctgggcatagagccgcatcatattggccaccatcccggcgatcgccgcgcgcagcatcatcgtgcgcgtggagttgaacatcacggcgaatccgcagatgcccacgaaggtggcggcggcattgcccacccaccacagcacgccggtcagctccgctccgggcaccagtggttgcaggccggtggccagcgagacggcccaggcggcggcgcccgccgacaggatgatcgccaacgcgtagaacgcccggggcaggccggcggtgaagtcgaggcgggcgatgtcgaggatcgaggtgatcatcgggaagcccgggatgaggaagaggatggccgccacatagcccgtgccatccacgccgtggagcacatgccaggggatcgtgcggcaggccagcgtgagcaacaggtacaccgagctggccgtggcagcggccagcgccgcggtgccgaactggttgatcccgcgcttggccagcgcccgacgcacgccctggccgcaggcggccccgaagaagaccagcaccgcgtcggtcaatgagaagtggttcagcacggcgaatgcggcgcacgcgataccggcggcgagcatattgacccaccacggccaccgaccgcgcacatggcgtgcgatgtgatcgagctggtcctcgagctcgcgggcggtggaaccgtcgggcagggcgcgcgccaggcgttccagcgctccgatccgcgaggcatccacggccacccgcggcacttcccgcaccacggtgcggaagttgtcgcccttgtgggtggtggtgatgatctcggtcagcgacaccgacgcatcatggcggtccatgccgatggcctcggccgcgcgcgccatcgcatgcttcacccgataggcgccggtgccggcactgagcagcatcgagcccaggcgcaccaccgcctctgttccgtcgatgaagtcccgatcatggcgtgagtcgtcgatcacgtccccaatctttcacgaccgtccgacacggcagcgacgcaaacacccgctggcgcgccacgccgacatcggggtgtgtgagctacgggacatgtgtcgcacaccgattcggcacgactaaggttccccctatggcgaatctccgtactaccgccggcaagctcgctgatctcggcgaccggatcgacaaggcagtccacgccgcgtcggcaaccagcgtcgacaagcagcatgctcgcggcaagatgaccgctcgtgaacgggtgctcaccctgctcgacgagggcaccttcaccgaaatggacgaattcggtcggcaccgcagcaccaagttcggcatggaaaagcgccggccctatggcgatggcgtgatcatcggcgtgggcgccatccatgagcgtccggtctgcgtgttcagtcaggacgtcggcatcttcggcggttcgctcggacaggtgtacggcgagaagatctgcaagatcatcgacttcgccgtgaagaccggcgtaccgctgatcggcatgaacgagggcggcggggcccgcatccaggagggcgtggtctccctggggatgtacggcgagatcttccgccgcaacacgatggcgtcgggcgtcatcccccagatcagcctcatcatgggtgccgcagccggcgggcacgtctactcccccgcgctgaccgacttcgtggtgatggtcgaccagaccagccagatgttcatcaccggccccgaagtgatcaagacggtcaccggcgaggacgtctcgatggaggagttgggcggcggacgcacccacaacgccattgcgggcaatgcccactacctggccgccgacgaggccgatgccatcgaatatgtgcgcgacctggtgagctacctgccgcagaacaacctcgaggatcccccggtctacgacttccccgatgacgtggacgtgccgatcaacgaccatgaccgcacgctggatgccctgatccccgacgacgcctcgcactcctatgacatgtccgagatcatccgcaccgtgctggacgatgacgagttcctcgaggtgatgggcatgtacgcgcccaacatcgtgtgcggcttcggccgcgtcgagggacgcagcatcggcgtggtggccaaccagccctcgcagctggccggcgtgctcgacatcaaggccagcgagaaggccgcccgcttcgtgcgcacctgtgacgccttcaacatcccgatcctcaccttcgtcgacgtgcccggcttcctgcccggcgtcgaccaggagcacaacggcatcatccaccgcggcgcgaagttgatctacgcctatgccgaggccaccgtgccgaagatgacggtgatcacccgcaaggcctatggcggcgcctacatcgtgatgggctccaagcacctcggtgccgacgtcaacctggcctggcccaccgcacagatcgcggtgatgggtgcctcgggcgccgtcaacatcctgtaccgcaaggagctggcggaggccgacgatcccgatgccgagcgtgagcgcctcatgggcgagtacgaggaggagatgtcgaacccctatgtggctgccgaacgcggctacgtggaccaggtgatctatccccatgagacccgctcccaggtgatccgcttcctgcggctgctgcgcaccaagcgtgaggcgctgccgcccaagaagcacgggaacatcccgctgtgagcaccatgtcgggccaccccagtggtggcggatggccgtcgggcccgttgtcggcgcccagcgcgccgctggtggtcaagggcgaccccaccgacgaggaactcggtgccgtggcggccgtgctggccgcgctcacggccgagtcgggtccctatgagaacgaggaccgccaggtgcccagcggctggaagtcgtactggcgggtggtgcgccagccgctcatcccggcccacgagggctggcggggcagcctgcgctgagcggtcgcgtcccgatgtcgggtgcatcgggcgaacagtaggctgaagacgtgaaactggttctcggttcgtcatcccctgcccggcttgccaccctgcactccgccggcctgcgaccgatcgccatatcccccgacatcgacgagacggcccacatggatgagggcattgacgagctcaccgcccgcctggccgagcagaagggcaactcagtgcgccgtcagctgcgtgaacgcggcttgctggacgaaccggtcgtgctgctggcctgcgacaccatgctcgagatcgagggcaatatcgtcggcaagcccggcaccgccgagaaggccgtgatgcgctggtaccgcatgcgttcgcgccagggcgtgatccacaccggccactatgtggctgtgctgcgcgatggcatggcacacgagcagacgcgggtggccaccacgatcgtcgacttcgccgacctgacggatgccgagatcgccgactatgccgccaccggcgaaccacagaacgtggccggcggcttcaccattgactccctgggtgggcccttcgtcacgggcgtgcacggcgatccgcacaatgtcgtgggcatctcgttgccgctggtgcgccagatgctgctcgacctgggagtgagttggttcagcctgtgggaccgcccgctgagtgaggcgtggcaggaacgccacggcgccatcgccgccacgaaacccggcgtaccggccgagtccggctcaccgcagggtcccggggcaccggccgaccggggcgaataggccatgaccactcccgacttcgtcctgcgactgcgcgcagcgatcgggcatgatcccctgtggctgatcggcgcgtcggccatcgtgctgcgcccgggtgacaccggccagcaggtgctgctcggcaagcggtctgattcgggccggtggtcgtccattgacggcatcgtcgagcccggcgaggcccccgaggagaccgcggtgcgcgaatgcctcgaggagaccgagctcgccgtggaggtggagcggctggtgatgaccggcgtgctcggcccgatccgctatcccaacggcgacgtgtgctccttcgtcgaccatgtcttccggtgccatgtcaccggtggacgggccggcaccggcgaccgggagaacactgcagtgcgctggttcggcgtggacacgctgccggccgacattgatccggtggtggtgcgccgcatccgggtggccgtggagaacccgcgcgaggtcgtgctggcgggtcgctaccccgaatacgcctgacgcggttgctggtggtccgggctgcttcgacgcgccctgccggccggttgttggagccggggtcaaggccaagctctggggccgacctcgtcagaggtgacgcagcgtgaggccggccagctggtcgtccatggtgaacgcaccttcccagccgggtgcatcaaagatcagggagtccccgctcgcggcggtgagggtgaatcccagcgagctgagggcgttgcgcaggtagtcgtagagctgttggccctgcgaaccgggcaccacgagggtgaccacattcgtctggtcaacccgttgacgttgttcgaggccatcgggcacgcgaaagccctgcggaccattgacgaagcccagggaggccagcgtcaccccacccagggacgacgggtcgaccgacggtgcctgcgagatgggcgaagccactgcggaagcggcccggcttgaggaggccggggccgtggagccacccgatccggccgagcaggcgctgagcaccagggcggaccccaggcatccggcgatcagcgcgcaccgacgcgtactgcgggacggatgactcgcttgcatgccaccagcgtaggtgctggggctggaaatggcccgcctgccgaacgctcacggccctccacgccccatgcgatgccgttcattctcccgtgagaattagagcaattccctttgaatccacctccggcctccctcgggcgtcgccgcatcccgccaagtctcttggaattccttgacgcctgggccgacagcgtcagacactggagccgtgacccccggttgcacatctcccatccccccaggaaaatatgaatctttccagaaatgaggagccagaatcatgagtctatccgtgggagaagtcgcgattctttgcggatgggccttgtccgttctgctttcggtgtggttctgcggctcttcacgaacgagggtgtagcgggttgagcgtgtcggtggccgggtaggggtcgaggtctccctgaggatggaagttctcacactcgccatctgccggaagacctcgacgtgtcacaccctactttcactacaccttgcctgaccacgttctgcggtctcgacgagctcggcctggaggctgtcgggcagcgtctggacccggatcgggcggtgatcgagtgccgtgtcgtggagccggaccggtggtgccgcgagtgtggatgcgagggcgccccgcgcgacacggtgatccgtcggctcgcgcatgagccgttcgggcatcggcccacgaccctgctgatccgggtccggcgctacaaatgctgcgggtgtgggcgggtctggcggcaggacaccacggccgccgcgccggtacgggcgaagatctcccgcggtgggttggcgtgggggctggcgggcttggtcctcgatcatctctcggtcacgcgtgtcgcggcagggctgggggtgtcctggtccgccgcgaacgacgcgatcctcgccgagggccgccggcggctgatcgatgacccggcgcggttcgagggcgtgaccacgatcggcgtcgacgagcacgtgtggcgacacacccgccacggcgacacgtacgtgaccgtgatcatcgacctgaccccggtgcgcgacaagaccggcccggcacggctgctggacatggtcgccggacgctcgaaagccgtgttcaagacctggctcgccgccagaccgaagccctggcgagaggggatcgaggtcgtcgccatggacggattcaccgggttcaagaccgccgccgccgaagaactgcccgacgcggccccggtcatggatccgttccacgtgatccggctcgccggtgacgcgctggagaactgccgacgccgggtacagcacgacgtcttcggccggcggggcatgaagggcgatccgctctaccaggccagacggaccctgctcaccggtgccggtctgctcaccgacaagcagcaggcgcggctagatgccctgttcgccgacgacaggcacgtcgaggtcgaagcgacgtggggcatctaccaagacatgatcaccgcctaccgggacaaggaccgcggcctgggcagattcttcctcgcgcacacaatcgacaagatcagcgccagcgtcccggagcagctcgtcgagatccgcaaactcgcccgcaccctcacacagcgcgcttcggacgtgctcggctacttcgaccgccccggcaccagcaacggccccaccgaagcgatcaacggccgactcgaacacctccgcggcacagccctcggcttccgcaacctcagccactacatcgctcggtcgctgctcgaagccggcggattcagacccgcgctacaccctcgttcgtgaagagccggttctgctacaggtatccagtgagtcggatccacatggtcctcatgctggtagttgccgtcgcactgccggtggtgggtgcacttatcaacacggcctacgtggtgttcaccctcagccgtcggcgcagctccgaacctcgctcgtgacccatctcgtccaccatgcggattccggtcctcccccgggccggaacccgtggacgccacggtggcaggaaccgacggaccccgccgacgccatccccatttcggtggacagttgtccggtcaggtaaacctgaagacatgcctgagggacacgtactgcaccgacttgccgcacgattcaatgagctgttcgccgacgaacaggtgcaggtgagctccccgcagggccgcttcgccgagtcggccgcactgatcgatggcagcaccctgatgcaggcccgggcatggggcaagcacctgttcgtgcgcttcgacgcaccgatcgccgatcccatcgtgcacatccacctggggctcatcggcaagctgtcgttcaccgagctggcgccgccggtaggccaggtgcgcgtgcgcatcaacgacgacacctgggccgcagacctgcgcggaccccagatctgccggctcatctccgaggacgaggaggcggccgccaccaagaagctgggcgccgacccgctgcgcagcgactccgatcccgaacgggcttggacgaaggtgcaccgctcgggcaagcccatcgcctcgctgctgatgaaccaggcgatcttcgccggcgtcggcaacatctaccgggccgaggtgctgttccgtcatcgcattgacccccagtgccccggcaacaagctccaccgggagagcttcgacctgatgtggaacgacctcgtgcagctgatgcgcctgggggtccgtgacgggcgcatcgacaccgtctatcccgaacacacccccgaggcgatggggcgcccgccgcgcgtcgacgcccatggggacgaggtctatgtctaccgccgcgccgaccagccatgcctggtgtgcggctcgccgatccacgagaccacccttgagggacgccatctgttctggtgcggacgctgccagcggcgccactgaccctgctccagcgacgccggaggcctgcccatcgtggatcccgacctggaaatgccggcgccggcaatctcgacggcgcggggcgacgccccgtgaggggcccggtgtcctagactccttggggaacccaacggggttgcttcaggaggaattgtggtcgctgtcgacaccactcgcaccatcacgaaggtgctcattgccaatcgtggcgagatcgcggtgcggatcatccgtggcgccagggatgccgggctggaaagcgtggccatctacgccgacgccgactctgcgtcgctgttcgtcgagatggccgacgaggcgttcgcgctcaacggcgccacaccggccgagacctatctggacatcgacaagatcatcgccatcgcgaagcgctccggcgccgacgcggtgcaccccgggtatggcttcctgtccgagaactcgaacttcgcgcaggccgtcgtggacgccggcatggtgtggatcgggcccccgcccgcagcgatcgaatccctcggtgacaaggtgacggcgcgccacatcgcccagaaggtcggcgccccgcaggtgcccggcaccactgatccggtcaagaatgccgatgagatcatcgaattcgccaagacacacgggctgccgattgccatcaaggccgcattcggcggcggcggccgcggcctcaaggtggcccgcacgctggaggagatcccggcgaagttcgaatccgccacccgcgaggcgatcacggccttcggacgcggcgaatgcttcgtggagcgctacctcgatcgtccccgccacgtggagacccagtgcctggccgacgaatacggcaacgtcgtcgtggtgtccagccgcgactgctcattgcagcgccgccaccagaagctcgtcgaggaggcaccggcgcccttcctcagcgacgatcagctcgaccagctctattcgtcgtcgaaggcgatcctcaaggaggccggctatgtcagcgccgccacctgtgagttcctcgtcggcctggacggcacgatcagcttcctcgaggtgaacacccgcctgcaggtggagcacccggtgaccgagcaggtcagcggcgtcgacctggtgcgcgagcagttccgcatcgcctgcggcggccacctcgactaccccgatccccgccttgagggccacagcttcgaattccgcatcaacgccgaggacccgggacgcaacttcatgcccgcccccggcaccctcaccaagttccagccgccgtgcgggcccggggtgcgcatggacgagggctaccacgccggcatgagcgtgccgggcgccttcgactcactcgtcgcgaagctggtggtctacggcgccgaccgcgttgaggccctggaacgtgcgcggcgtgcgctcgacgagctggtcgtggagggcatgcccaccgtggtgcccttcgaccgggccgtggtgcgcgatccggccttcaccgccgaggacggcaagttcgccgtgttcaccgactggatcgaaaccgaattcgacaaccacatcgagccctacgccggcgatctgggcgtggccgaggagccggttgagcgccagagcgtcgtggtggaggtcaatggccgccgcctcgaggtgacacttccggcaggcctgcaggccgggcccgccaagtcgtccaagttgcgcaagcccaccaagcgtggtcgcggcggcgggaagatcgccgaggtcagtggcgacgcgctcaccgcacccatgcagggcaccatcgtcaagacgtcggtgcaggagggccagcacgtcgacgagggtgagaccgtgctggtgctcgaggccatgaagatggagcagcccatcgctgcccaccgttccggtgtggtgcacaacctggtggccgccggcaccgccgtcgccagcggtgatgtgctctgtgagatcaccgacgcctgagccggggtggcgtccccgtgcggacgccacaagcagtgcggacgtcgggaacttggcggacgtcgacccgctggcgagcatggacccccagtggcgcggccatgccgtcctgttggtgccggtgcccgagctggaacccttcgcccgcgaacgcacacggttctacgaccgctcgttcctcagcgacgacccgcggttcttccaggcgcacatcacggtgctcgcgccgttcatggcggtgcccgagcgttcccgcatcgccccgatcgtggacgccctgcatccctttgacttcgaattgtcgcagctgggcgtgttccccgatgggctcattcacctacgccccgagcccgacgcgccactgcgggacgcgatcggccgcgccgtcgaggcctttcccgaggtgcgcggctacggccacccggcaccggtgccccacctgagcctggaccgactctcaccacaggtgagcgtgcagtcgacgcgcgcgctgttgggcaagctggtgcccgcccactgccgcgccgaccgcatccagctgtgctggtacgagtccgaccattgccgggtgctcgacgagtgggagttgcgctgatcggtcccggctccggtcgggtggtcgtcagttccagctgtgcaggatctgcatgtactgggcgcgctcgaaggcctccgggtcgtccaccgacgaggcgttcatcgaaccgcgcagctggtccaccgactcgtagtcgtggctggccagccactggcgcatgtcggcaaccatccgcgagatctccgccggcccccggctgagcaccgccgaggtggtgcaggccacggtggcccccacgagcagcgacttgatcacatcggcaccaatgtgcacgccaccggtgatcgcgatctgcaggtccggcacctgggccgacaggatgcccgcccagcgcaggcgcaacggcaactcggctgatgtcgacagggccaacgtcggatgcaccgacaacgcctcaaggtcgaggtcgggaccgtagaagcggttgaacagcaccaccgcacgggcaccggcctgcaacgcccgcggcgcgaagtgggccaccgagctgatgaacggggagaccttcaccgccaacggcaggtcgccgatggccttcttcacatcggtgatgatcgtcaggtagtcgtcctcgaccgcctcgggcgactgcccggggtcggccgcgacgttgtacaggttgagctcgatggcgtcggcgccggcacgggcgagcatgcccgcatagcccgaccagttgcccgggtgcgagccgttcactgaggcgatcaccgggatggtgagcgcctgcttggcctgctgcacgagcaccacgtgacggttggtgccctggtcgccctggtccacctcgacgagcggcgaggaggcgaactcggcgaactcgtcaccgctgtcgagcaacccggcggcctccagctcctcgtcctccgcctcctcggcgaacaggctcggcagcaccacggctccggctcctgcggcctcgatggcacgcagcttgtcgacgtgggcattgagcggactggccgatgagatcaccggacacttcagctccaggcccaggtagttggtggagatgtcgacgttggtggtcatggctcactcccctgctttcgtcgtgcccgcggctcccgcatcgcccgaagggggcgtcacggtgccaccgggctcaggggttggcgacgtgaccggctggtcgtcgtcgccagcaccctcccgctcggcaggcagcacgcgggtgacgccggccagctggctgtagtagcgccaacgctcgtcggcatcggcctgggccaggtcgcccagctcacgggcccggtcgggataggcccgttgcagcatcgcgaagcgcgcctcgccgcccatgaagtcggcgaccttgcccatcggtgccctggagtccatgtgcaggggcaccgcatcggcgtcctcgctgggacggaagcggtacagcggccagtatccggtgcgcaccgcatcgccctggtgggtcatcgacgtctccatgtcgatgccgtgggcgatgcaggtggagtaggcaatgatcaggctgggaccgtcccacgcctgcgcctcggccagggcgcgcacggtctgctgctggttggccccgatggccacctgcgccacatagacgtcgccataggcctgggcgatcatgccgaggtccttcttggcgcttgccttgccgtggggggcgaactttgccgccgccgcgcggggcgtcgccttggacgcctgcccgccggtgttggagtacacctcggtgtcgagcacgagcacattgacgttgtgacccgaaccgagcacatggtccagtccgcccgagccgatgtcgtaggcccaaccgtcgccgccgatgatccacaccgacttctcgaccaattcgtcggctaaggttgccagccgccgcgccgtcgcgtcggaacggtcggccagggcctccttcaatcgcgtcacgcgctcgcgctgggcgtcgattccgggctcgtcatgctggtcggcacccagcagctcgcccaccaggtcggcgtccaatcccccgacatgttccagcaggcggcgtgcctcggcgttctgctgttcccagcccaggcgcatgcccaggccgaactcggcgttgtcctcgaacagggagttgctccacgccgggccccgtccggccgcattgatggcatagggggccgtcggcaggttgccgccatagatcgacgagcagccagtggcattggcgatgagcatccggtcgccgaacagctgggtgagcgtcctgatgtagggagtctcgccacaacccgagcaggccagcgagaactcgaagagcggctgcaactgggccacgcccttcacctggtcatgacgcaccttggagcggtcgatctcgggaaggcccaggaagaagtcgaagttggcgcgctccgtctcgaggtgctcacggcgcggctccatattgagcgacttgtgcttcacctcggtcttcgacttggccgggcagacgtccacgcagatgccgcaaccggtgcagtcatcgggggccacctgcaccaccaggcgatggccggcaagcttgcggtcacggtagttcttcgacttgaagccctcgggggcgtcagcgaactcggcctcgggcgccaccttgatgcggatcgccgcatgcgggcaggtaatggcgcacttgccgcaatcgatgcacaggctctcgtcccagatcgggatgtcggtcgcgatgccacgcttctcgtacttgctcgtagcgatcggccatgtgccgtcaacgggcagcgcactgaccggcagggcgtcgccctcgccgcgcagcatcgcgccggtgacgcgcttgacgaagtcgggtgccgcgtcgggcagtggcgccatgcggtgctggtcgccgaccacgccggcgggcacctccaggtggctcagcgcctcgatggcggcgtcgacggcggcgaagttccgctccacgatcacccggccgcgccgaccgtaggtcttgtcgatgctctccttgatgcgcgggatcgcctcggcctggtcgaccacacccgacaggtagaagtagcagggctgcatgatcgtgttgatgcggtgccccagcttggttttgatggcgatcgcggtggcgtcgatcacccagacgtcgagcttgcggtcgaggatgatctgctggatctccaccggcaggtgcgcccaggaatcggcgccgaacggcgagttgatgagcaccttcgcgcccggcttggccaggtcgagggtgggcatcttctcgagcagctcaaactggtgcaccgccacgaagtcggccgcgtcaatcagatagggcgcatcgatcggcttgtcgccgaagcgcaggtggctcaccgtggtggcccccgacttgcgcgagtcgtagacgaaatagccctgtccatatcgcccatctgcggcgatgatcttcaccgagttcttggacgccccgacggtgccgtcggaacccaacccgtagaagacggcggtcaggccgggatggtcgatggtgaaggagtcgtccaccggcagcgacaagtgcgagacgtcgtcgttgatgcccacggtgaagcgacgatgcggagcgggcgaagccaggtcgtcgaagacggccttgaccatggcgggggtgaactccttggagctcaggccatagcgtccgccggtgaacttcggcatgccggcgtcgaagtggtcggcctcatcggccagtgcggtgatcacatcggcgagcagtggctcgccggccgagccgggctccttggtgcggtcgagcacggcgatatggcgcactgaggtgggcagcgccgctgcaagttgctcggtggggaagggacggaagaggcgcacctgcagcacgccgagcttctgcccggccgcattgagggcatcaacggtctcgcgggccgtgtctccgcccgagcccatgatcacgatgacgcgatcggcatcgggcgcgccgtggtagtcaaccaggtgataatggcgcccgctgcgctcggccaactcgtccatcacctcctgcaccaccgagggggtgacgtcgtagaaggggttggcggcctcgcgggcctggaagaagacgtccgggttctgggcagtgccgcgcagcatcggggtgtcaggagtcaggccacgttcgcgatgagcggaaacatcgtcttcgcggacgagtgccgtcaggtcatcacgggtgagggtctcgatcgtgttcacctcgtggctggtgcggaaaccatcgaagaagtggacgaagggcacccgggtgcgcaacgtggccgcatgggccaccgccgccaggtcgtgggcctcctgcaccgatgccgaggcgagcatgccccaaccggtctggcgcacggccatcacatcggagtggtcgccgaagatcgacagcgcatgggtggcaaccgcgcgcgccgcgacgtggatcaccgccggagtcagctcgccggcgatcttgtacatattcgggatcatgagcaaaaggccttgtgaggccgtgaacgtggtgccgagcacacccttggtcacggcgccgtgcagggcaccggccgcgccggcctccgactgcatctccaccacctggggcacgccaccccacaggttggtgcgcccggcggcgctccacgcatcacagctctcggccatcgcggagctcggggtgatcgggtagaccgcgatcacctcgctgaacgcgtgggcgacacgggcggcggcttcattgccgtccatggtttcgcgatgttgccccgcggacgcggtcggtcgtgcagaagtggtcgtgccgtgatcggggtcgacgctcgttgtcatccatggcctcctgagctctacccctttcttaccgcacgcgacccccggggacgagcccccatgggcctgctgagatgcccgcacgcgcacctgccggcggatacgcacggacgtgcccgcacctgccgtcgtcgacgcaacaccgccttcgggccaacgaccctgccccggcgacgcaaccctgcgccgggggcgaccgacgccggcgcactgcgggtcaggcgcattgcccgctgggccccggaagctcgcgatagcctgccagagtgttgcacttgtcgtcgggccggccacgcggcggaccctccgggatgcgccgcggggttcacggtgccgtggtgctactgctcggcgccatgatggcgaccctgtgggtggccctcggccccggcacgccggcccgtgcccagaccgaccaaccggtgttcacccgctacgacgagacgctttcactggacgcacagggcgtggcaaccgtggtgatcgacgccaccttcgacaccgggaacggaagctctgccggaccggcactgtcgtttccgcgtcgggtggaggtgccccccgcccagggccggccccggttccgccagctgaccaacaccatcaccgatgtcaccagccccagcggggcacccaccggcgtgcgccacaccagcacggtggacaccgacctgttccgcatcggcgaccagaccaaccagatcaggggcgtgcagcactaccgggtgagcctgcagatcgacgggctggtcaccccgaccgacagtggcgatgagctcgcctgggaggccgtggacgccgtcgacacgctcgcgcgcaacgaagccagcttcaccatcgaggctccgggggcagccacgtcgagccggtgcgccaccgacctgcaaccggtcggctcgtgcccgatcacgagcaacgactcgggcgtcagcgcctcggtgaaggacctggcggccgccgacgcggtgcgcatcaacgtgacctacccgagcggcaccttcaccgatgtgagcgaggactacaccgtccaccgcaccctggccgaccgcttcccgctcactgccgtggacatcatcggcggcctggctttcgggctcatcggactgatcggctccgtcggctatgccctcacgcagggtcgcgaccgacgctgggattcctcgcacgccggggatcgcaagccgccacccgacacccgcgtggtcaccgggcggcgtcgccgcgtgccgctgcgcaccgagccccccgaacagacgctgccgggcgaggttggattcctcctggaaacccacaccgaaaccgaccagatcacggcgaccttgatcgacctggcggtgcgtggattcctcaccgtgcaccgcgaggacgactccagctggacgttccggcgcacccagaccgacgccagcaccctggccacctacgagcgcaccgtgctcaagcggctgttcccgaaggtcaagggacgcatccgggtgacgtcgagcaccggtgaggcgagccgggcaaagggcagcttcaccaccacccgcgaggccatcgcccgccgggtcggggcgctgggttggttccgggtgccgcccgacaaggcgcgcttccgttcacaccgctttggcgtggtcatctgcatgttcgggttgttgacgctcatcccgttcgtgggcttcatgggcctgggcctgtggtcggccggcatcatcctcgccggcatctgcgtgctggcgatcatgcccttcaccccctcgcgcaccccccagggcagcgccgtgctggaacaggccgagggcttccgccagttcctgtccgatcccgatcccgagctgatcgactggaagcacagcggcgatgtcttcagccgttgcctgccctgggcggtcgtgttcggcgtcgacgcccagtggaccgcgctgttccagaagctcaccgacgagggccgctatcgcccacagctcgcctggtacgagagcctgcacggatcggtgtgggccacgcagggccatatcgaggcgctgagctcgctgaccagcagcttcaaccacgccgtggccgccgccgatcgccatgcggctgcggtgagtgggctcgacgactccgaatgagccggcccggctgcacgtccttctcgcacggtcagacttgagtgcccttctgtgaactttgggtgcccccgtcgtggtcgccgctcagagcgagatagttttgagggtaaagacagccgttcaaaggagcacaccccatggctgaaacgatgcttgccgagcgtttctacgcgaaggaccacagtattcacctcgaggagatcccgatccccgaaccgggacccggcgaggttctcatgaaggtcgcctactgtggcatctgtcattccgacctgagcctgatcaatggcaacttcccgccgtcactgccggtggtcacccagggccacgaggccagcggcaccattgtcaagctcggaccgggcgtcaccggttggagcgtcggcgaccgtgtcatcccctcggccggacgtccctgcatggtgtgccgcaagtgccgccgcggcgacttcgccagctgcctgcacctgcacctgatggccttcgcctacgacggcgcctgggcccagtaccacgtggcctcggccatgggcctcaccaagatccccgacaacgttgccatggatcaggccgccctgctcgctgacgcagtatccaccccctacgccgccgtggtgcgcaccgcccaggtgcacaccggaaatgccgtggccatatggggcgtcggcggcgtcggcacgcacctcgtgcaattggcgcgtggcgccggcgccgtgccgctgatcgccattgacctgaacgacgaggtgctggagcgggccaagcgcctgggcgccgacttcgccttccactccgatgatcccgacctgatgaagaagatcgaggaagtcaccaacggccgcatgatcgacgtcgccttcgacgccgtcggcatccaggccacggtgcgggcagccgtcgaatcgctcgacgtcaacggcaaggtcgtcacactgggcctgtccgaccaggacattgacgccggcccgttcctggacttcaacctgcagcgcaagcaggtgcgtggccacctcggctaccagggccaggacatcgcgatccttgccgagatgctgtcgttcggacgcctggacctgtccgaatccatcagcgacgtggtaccgctgtccgaggttgagcgcggcatcgacgacctgaagaaccacaagggcaacccgatccgcatcctcgtgaagccctgaacgaaccgctgaccacacagggggcgggaacgcgcagatctgatctgtgggttcccgcccccgagtcgttcaaggtctggacgctactgccagccacccattgcggggcgtccgctcccccatcggagggactaacggcgcctcgagagctctgcccgcgcagcccgacactgaagcaccaggaccagttcgaaggcggtagccacgaccactgcaatgatccccgcaagaaggtcactgaacgcataaaccagcgcaaggcagaagaccgcggcaaacagaatcaagcaaaagatgggtacagcgacagtcctcccgtaatgagcgtcgcctcggcgcagggaagaatgaatccaggcctgggctccgacaatcgcgaggaccccagccaagcactccaccgcgacaaccccgatccttgcgtcgccagccgtgaacatcatccacggaagcacgagaaccgacaaggcacctgctgccacgcaggctccgatggccacgcgagcggttgccacctcgtttcccctcatccccgaacctcctacccgctccggaccccactcactggaagcctagggggaccggcatcctgacatgcccggctggtcacaaccgcaccatgggagcctgccccagccggtcgcggagaggaaggcaagtaccaactcctgtcggatccgggtgattcaccgcatgcccacatgaccatcgtgacgcctcaccgtgagatgcggccaccgcccatcggcaggacagccacgcacgtgcgcgtctacgcttcaagggtcaaacatcagccaccaagggaacgcacccatatggtcctggcgctccctgccgaaggaattcgatgcccgtcatcatcagccccgccacccgcgaagagcttgccgagtgcgcccacctgctgatgctggggttcgcatcggatcccttcatcgaacggatcgtgcctcccggagcaggacgccgtgcccggctgacaaggctctatgagctcaccctgcgcaccgggaccttccgcaccggtgtcatcgacgtcgcgcgctgcgagcccgatggcgccatcgtgggcgccgcctcatggcaggcacccaatccgaagttctcgctcgcccgcgccgtggtgcaggccgtgggctgcgccgtgttgttggggccccgccaggtgctcgtcgcccgcaggctgctggccaggctcgagaaggcccacccggcccagccgaactggtacctggaggacatcgccgtgcaccccgacgcacggggcgccggcatcggcgcggaactgctggcccaccggctcggaccgatcgacgccggcccgccgctggcctgttgcctggaggccaccacccccggcgcgcagcgcctgtatgaacgcttcgggttccgcccatcgcgttggttgaacatcactcccgacggctatccgatggcgatgcgtcggccggtgacatcgccgcgctgagcggcgtaggggcgagctcaagactattaggaggatttgtcgacatcaccgtgtcggcacctcatggagatacccacgcattgcgcctctctagcccaaggtgccacaccccgcctcgggtctctgcattattcgtagtcctgacgcatatagaccgaaagacattgctgcgcaacgactccccatattttccgcagcggctgccttccaagaacgagcaacgattctcgccatacaatgaccacgcccacccatgaccccagaagagagaacgctgcgatcagccccatcgcccacccgattgcatcgatgtcattgatcccgccggcgcccgttatggagaacagaagaatccaagctgccatcgagactgccgctctcgcgtaaatgttcgtccacgctaggcgtcggatcccctcgggtcggcgaagggcacaacacgcaaggagcccgagaggtaccggcgtgagaatcagcgccgccccgacaaataggctgagattctcctccgtgtcagtctcgggaagatacttcgtctctccgagattgatttccccaatccttcttccgttgtcaaatgcaatatactttccccctgaattctcaacgcgaatgctcgtcgttctaagcacgctaaccccctaggacgaactatcaccggaaagtaccatgtttttatcaaatttgacgaccgttgggactccctgaatacttatcagccgcattggcgttctgtcagacccgatgctattaattgaactggcggccacccctcccaatatgatggctaccaacgatgaaaccccaaagaatagtgcaacaggtccgttaaaatgcttctttccgctcagccgaatcagacccgagtgacaaagacacgcaaaggatagactggcaacgaccacacatatgatcgccatgactatccaccctagaaccggctggtctccccaatcagctcgaaaaacaatcagccacgacaagagcaaggatagtggtatccacacaacactattaacaggtatccgagatcggttagcaataccattcttgcgaagatgcatgattaccccatatcccttgacggagactttgtgttgtgatgttggcacgatacacaaaatctatggtcaagtgaacaccgagccgctgaacccccaatcggcccgcaggacctggtcaatgccggccaggtcggggatcccagagccggtggaggctcctgctccggagaaggccacgatccgatggctggcagagatcagatcggccagctcggcgacgaatcggctcgtgctcatgacgcgctcggcgccccggccccgcgcgtcgccagcacctcgcgcagcacgctcaccgcattgagcaccttgggaaagccgacatagggcacgcagtgcaggaatgcctcggtgacttctgcgcgggacagccccacgttgagggccccgttgatgtgcaccacgagctggtcgtgcgtgtcgccctgggtcgtcaggcttgccagcgtcaccaactcgcgttggcgcatgtccaactccggacgggggtagacgtcgccggcctgctcgatgatccaacgccccagatcgggcgcgacatcggccagcgaatcgagcacctggttcccgttgttcccattgatgcggttgagtgcctcaagcccgcggtcatagcgttcgttggtcgtgtgattgtcagtcatggacgtgcgtctccttggaaggactggttatctgccggatggctccggcgactgcgacgctagggtttgaaccagggttcaaggcaagcgcgattcggtggatgatcgccccatgcgcatcagtgaggtcagccagatcaccggaatccccgcgtcgacgctgcgctactacgaacgacgcggcatcctggagccctcccgctccgacgtcggcgaccgtgactacaccgaccacgacatcgcgtggatccgggccgtccagcggctgctcgacaccgggatgcccctggcccaggtgcaggaatactcccagttgcgccatgagggcgattccaccgtgccggtgcgccttgccatgctgcagagccatcgcggtgaactcgaggcccggcgtcgtcgcctcgacgagcaactggcgttcctcgatgacaagatcgacgtctaccgcaccaagctggcgtcccagagcagccattgacggtgcgggcaggagcctgcgccgcgacatggcgccactcacaccccccggcacacccgacccggcaccgcgcagggccacctgtactgtgagctgccgccgcgatgcgccagccagccgaacccaccccgccggtgccgtcgtccggaccggatgaaaggaaaccccgcgcatgaagatgtggacctactcgtatttccaggccaactccaccaatgccggcctgtactggcgcctggtggtgatcggggcgatcctggcggcgctggtggtgctgctcgtcctctaccgacatcgccgtagcgatatgagggtgcgcgagatgctcatcatcgtctcgttggtcgccgcgctggccatggccatgcaggccacggacttcttcgagtcgcaggcctcgctggacaactccggcaagatgatgagcttcatcgacaacgtggcgcaggcgcagtactccaccaccggcgacatcgcggtgagccagaccaatctgtccaccggactgatcatcaaggtgggtgacaagagcttctacgaggtcaccttcaacaacgacaagaacatcggcagctaccagctcacccgcacccagctgatgaactcacagatcgagtacgtgaaatgaccatggtcccctacgacttctgggcgctggcgctcaagctcgccctgggcttcatctgcctcgtgttgcagatcaacctctcgggcaagggcatgctggcccccaactccgcgatcgaccagctgcagaactatgtgctgggcggaatcgtcggcggcatgatctacaactccgccatcacgcccatccagttcctcatcgtgttgttgttgtggacgctcatcgtgctgggcgcgaagttcgggtcaaaccatgtgcgcctggtcaagcacgtgatcgacggggaacccaccgaggtgctgcgtgatggacgcctggacgtggcgcaactggcacgactgggcgtctcggcccacgacctggcgctcaagctgcgcaacagcggcgccaccgacatggcgaaggtgcgtcgtgccgtgcttgagcagaacggccagctgacggtcaccatggagggcgacgacctgacgcagttcccgatcatcctcgacgggcagatcgacgaatatgccctcgagctgaccggcaagaaccaggaatggctcgatgaccagttgggcagggccggcaccacgctgcgtcaggtgtacatggcccgttatgtgaacgggcagctccacgtgtcggccttcaccgactgagcccggccccgcgtccgcctagcgccggtcggtgccgccgaatccgaccagctcgggcagcacgcgggtggtgtcctcgtcgaggcgcacggtggcgaactcatcggcgcgggtggcgccatggttgatgatgatcaccggcttgccggccttgttcatgtgccgggcaaaccgcaggcccgacatcacggtgaggctcgacccggccaccagcagcacatcggcggcgtcacaccaggcgaaggcggcggcgacgcgtccgcgcggcaccggctcgccgaagaagatcacatcgggcttcaacatcccgccgcaggccgggcagggcggcacccggaagccctgccagttctccacctcggcgtcggcgtcgggacgcagctcagccggtcccaggtgatcgttcatcggcaccccgggattgagcgcagccatccactgctgcatgtcggcacgcgggaacatccgggcgcaatcaaggcagatcacatcggcgccgcgtccgtgcagggtgagcagttgacgcgtaccggaggcctcgtgcagcccgtcgacgttctgtgagatcaccccgaccagcgggctgggcgagccagtgtgctcccagcgggacagcgcgcggtgcccctcattgggttgtgccctcgacatgacggcccagccctgataattcctggcccaatagcgttgtcgggccactggatcgtgacggaactcgtggtacaggatcggcgtggcgcggatcgaatcgggaccgcggtagtcgggcactcccgagccggtgctcatgccggcgccggtgagcaccaccaccccggccgcccccgagatcagctcacgcgcctggtcgacgtcgccacgcaggttggttgacggctgccagccgctggtggcgcgacgcacatggctgcgggcaaaccggctgatcgcctcgctgctcatgcatcactcccctgctggttggccgggccatcgtgcccgggctgttcctgcggcccatgcccgtgtggctcgatgcccctgtggctcgatgccccagtgactcggaccctgactggcccagcctaagtcggcacgccccgaaaccaagcctgctcgccctcagccgaagccggcggcgagcagcccgggcaggtgacgcgatgcccccgactcagagcttggcccactccggaccgttctcggccagtgcctcgtccagcttgcggaacaacggcaccggcttggtcagcggggtgccgaccttgatgggcaacgactgccagaccgcctgggccgagtcatagtcacccatcagcacggggtagctgtgctcctggtcgccctcgccctccgacacctcacggatctcgggctgggccgcccacacgccggtgccgcccaacatctcgaagatcttctgtgccgaatgcggcatgaacggggtgagcagcgtgttcgcatcggacaccacctgcagggcggtgttgagcacggtgtcgcgccgatcggtgtcatcgccgagcttccacggctcctgctggctgatgtactgattggcggtggccaccacgcgcatcgcctcggtgatcgccgccttgaacttgcactcctcgatgagcttgcccaccgtgatgaatgccgccttcgagctggccagcagctcggcgtcgacattgagcagctcatgggccggcggaatctcgccattgttcttgaaggccatcgacaaggagcggttcacgagattgccccactcattggcgagctcattgttgttgcgccgcacgaattcatcccaggtgaaatcggtgtccttgttctccgggccggccaccgcaatgtaatagcgcagcgtgtcgggtccgaattcgcgcaggaagtcgcccacatagatcaccacaccgtggctggtgtccaccttggagcccttcatcgtgaggaactccgagctgaccacctcggtgggcaggtcgagcttgccgagccacttgctgggcgtgccgccccgcgaaccctcaccgttgagccccaacagcatggagggccagatcaccgagtggaagacgatgttgtccttgcccatgaagtagtagctgcgggcctcggggtcctgccaccaggccttccaggcatcggggtcgccggtgcgccgcgcccattcgatggaacccgacaggtaaccgatcacggcgtcgaaccacacgtagatgcgcttcatgtcgtcgttctcccagccctcaaccgggatcgggatgccccagtcgaggtcacgggtgatggcccgcggcttgagctccttggcgaagttgtagctgaagttcaacacattgggacgccagtccttgcgtgagttcagccaggtcatcagttcctcggcgagtgcgggaaggtcgaggaagaaatgcgtggtctccacgaaatcgggaacttcaccgtcaatacgggagtgcggattgatcaggtcgatcggatcaagctggttcccgcagttgtcgcactggtcgccgcgggcgaactcatagccgcagatggggcaggtgccctcgatatagcggtcggccagcgtgcgacccgtgctcggcgagatggccccgagctgggtcttctcgatgatgtagccattgtcgtagagggtgcggaacacctcctgggtgacggcctcgtggttgagcgtcgtggtccgtgtgtacaggtcgtacgacaggcccagcccctgcaggtcctccacgatgatgcggtggtacttgtcggcggtctcctgggcggtgagcccctcggcatcggccttcacctggatggccgtgccgtgctcatcggaacccgacacgagcaggacgtcattaccggacatgcgcatataccgtgcgaaaacatcggagggcaccccgaaacccgagacgtgaccgatatggcgggggccgttggcatagggccacgcggccgtggcaagaatatgagcgcacatggcccccagaatagtgggaacggcattggtgtcgacgcacgcccgcggcccggcggggccggcagccgctcgtggacccagcggggccggcagcaggtcgcacgcctgccggcgcgatagcctcgccgatgagacggatctgcccacgggcatgcaacggctgctcggggcgccacgagatgaggagacgccaatggccgatggtgatgtgcagttcgaggtgcgtgagggcaccggctacctgcggctgatgcgccccacggcgctcaatgccctgtcgccccagatgatcgccgtgatcaccgaacagctgagcgcctggcgcgacgatgcgtccgtgcaggccctggacatcagcggcgagggccgtgcctattgcgcgggcgccgatgtgcgctggatgcgctccacgatgatcgagaacggcgtgcagtccgcactggagttcctggccgacgagtacgcgatggacgccgtcgtggcccagttcggcaagcccgtcaccacccacctgcacggcgtggcgatggggggcggactgggattgggcatgcacggggccacccgcgtggccaccgccgacctggcgatggcgatgcccgaggtgggcattgggctgtggcccgacgtcggaatgctgttcgagttctcgcgactgccgggcgagatcggcacgtggctggccctgaccgggctcacgatcgatgcgaacacggcgctggcagcgggcctggtcgaccaggttgacctgatgtccgccaagcctgacctggacctgacatgggtggacgactacttcgtgggcgacgacgcccgcgagatcatcacccgcctggaggccagcagcgatgaacgtgccgtgcaggccggcgagctgatccgcacgcgttcccccctgtcggtcgccgtgtcgctggccgcgatccgtcgcgcagccacgctccacagcgtcggtgatgtgctcgaccaggacctcgccattgcccgggcgctgctccccgacccgcaatgcgacttcgtggagggcgtgcgggcccagctggtggacaaggaccgccagccccattggtcggtggcgcgcatcgaagacattgatcccgacaaggcccgcgccatcgtcggctgagggctgtcaggatgattccccggtcggttccccgggaacagccccggggaacctcccggcgggagatccccgcagctcagtccgcaagcagcgggaactcctccaggttggtgatctcgtcgtcaccccaccaggtgagggtcaccctgtcggccacctcctccacgggaagcttgcgcaacaaggccatgatctcgtaggcgggaaggctggtgcccaacgacaggtgcgggatcacctcatcgaattgaccgccgtatggctgccacgcaggaaatgcctcgacgagcctttcggtgagttgcttgaacggctcggccggctcgggcgccaaatagaccaacccgtcggcgaagcccctgaaatcggtgagttcgaattcgaaacggtggacgtcgttgaacacctgacggatcgttgccaccagctctgccgtgacgtccgtcttgtcaacgaacggccccaacagggtgatgtgtgcgcaaaccacatcgtcgggcagcttcacgcctggccgcgatgccaggacatgaggtcgcacgaccgtttcgagtgccggtaccggcacctggataactgtgtgccccatgacactcagtgtgcctcacccgcgcccgaatagtgggcaggcttcgataccagcgcaatctgtgttcggagtgccgctatgttctcggtgcgccgggagcctgcaccgtcccttgggcgaacaacaaccgccatcgaggacgccccagggtgccgtcgcgcacccagatggaactgcgcaggctggtggaggcggagtcgatcgccttccaccgcagcaacaccgtgtccgccgacagacgggtctggcccatcacctcgaaggtcaccctgcgcggcaacggcccgatctgggccatgagacgggcgcgggtccagatgcgccccgaggccgcgtactccacgaaatcggggtgcaacagcacgcgcaacctggccggatcggagcgcacctcatcagtgagcagggattgctcggcccgcaccacctcggcaaaatcatcgggcgggtcgtcggcaatgctgaacaggtcgggctcggcatcggggtcaaccgtcggcgagggggcacccagcacggagcggtgctcctgggtggacgccggttccggcgcgacccggccacgtgccgcctcggacgcgtcgccgcgtgctggtcccgacgcgttgccgcgtgccggctctcccggcaccccgaccggccccgagccgcggaatcccggcccgggatcgggcagcttgccctgctggtacgccgtggccgcgccgtgggcgagcgtgtcggccgcctcgttgaggggatgcccggcgtggcccttcacccattcgaagctgacggtgcgcccggtgatcgcctggtcgatggccttcagcaactcgacgttctgcaccggcttcttgtcggccttcacccagccgcgacgcttccagccggccatccacttggtcacggagttgatcacatactgcgaatcgcacagcaccttgagcggctcatcgggcgcgcccgcggtggcggtgagcagctgcagcaatgccatcagctcgccccggttgttggtgccgtggggccatcccccgcacgcccagttgtccttgtcgatgaaccacgcccagccggccgggccgggattgttcagggaggagccatctgctgcagcgacgatcaccccgtcaccctatcggcgggccaccccgggttccggcgtccgggagctgccacggtggggatgggcggcactcaggacacgctggacggtgaggtcaccttgatcgagccgtccttgatgccctgggagaccgccgtgaggtcgtccgcgatgttctgcgccaccggcgcgcccttgccgacgcccaccattgtcaccccaccgttggccagggtgcccaccagcgtggtgttcgtgaagccgacgcccgcctcctcgatggcgtcgaagaccatctggtcgactcccgcggcagcagtccccagtgtggcggcacaggcatcgacgtagctggcgcacaggtcactgccggtgccgaccagccgggtgccctgatgggcgttcacggcctggacggcaccggtgtcggcagtccccgccacgggcatgaccacatcggcgccctgaccgatcaggtcctcggtccgggcgcgggctccctccttgtcggaataggggtcggccccgcccaggaagtcaccgctctgtgagcccatcgtccagccgacgagtttcaccgccttggacgccttctggttgaaataggtgatcccctggctgaatccgtccatgtacagggtgaccgcgggggcattggtggccccgaaggtgcccacggtgccgctggaactgctggccgccgccaggtagccggccaggaaaccgacctgggaggactggaagcgcacgagcttcaggttcttctcgctcaccggcttggtggcccccaccagcgcgaaatgcaggtcggtgttggcgcgggccgccgcggccagtgcgtcggactggtcagggctcgcgccgaggatgtaggtgcatcccgcacccaccatcgactggatggccgccggatagtcgcccaccgagtgggcctcggcccggtcggactgcacgcccaactgggcgacggccctgtcgagcccttgcgatgccgcccggctggcaccctggtcatcgaagccgttggcacccgacaccaggcaggccttcacctgcgcgtgggccgacgaggaaccactgctcggcggcgtcctcgcgcaaccaaccatcgcgagcgcgagcgacagaccaaggacaaccaggcggggcttcaacacggccctgatgctaccgacccggggcccgctcccccagtggccgtcggcccgtgcctgttcgcgccgcgtcgggtcggtctgtgtcggttcggtctgtgccggttggtgctcggcccgggcatcctcgcgctagagctgttcggcgcgccggatgaggttctccgcccccgccaggatgcccagcgtctggtgcttccaatcgggcgcctgctcctggtaggggccacttgccagcgagatggcgacgccggctgcgcgcagccgcagctgcaccgggtcgacccgcgcgtcgaaggaggccaacaaccgcctgatcaacacctcggtgcgggcggcctggcccgcatccatgtgttgcacggtgctcaggtgggcgatcatgcacgccaggtcatccacgcgccgcccgggacctgccgcctcgacgtcgagcagcccgctgacccgcccgccggacaggaacagctggccctcgtggaagtcgccatgggtgggttcctcggccggtgccgtgtcggccgcggcgccaacgacccgggccacctcccgggcgcggtcgccggcggccggcaattgcccggcgaccatgtcggcgtagtgccccacggcgtcggcccaggcgggacggcgtggcaggtcgagcagcccggcgggcaattcgtccagcaggccgaccagctgatcgccgctcacggccggggattcgtcgaagatgtggtgggccatcggctgcccgtcgagcgccgccagcaccagcagctggtcgtcggtggcggccagcaggcgggccacgggaagcccggcgcggcccatcatctccaggcgtcgcagggcgcgcggaccatcagcggcggtgaacgccttgaggtagaacaccatcgcgggcctgttcgatccggcggcgcgcaggctggcccgcaccaccgcccgggcacggggacgatagctgaccatctgcaggctgagttggctggcgtcgcatgagacgggcaccagccggtgctccagcagcagggccagcacctggtcgacgaccgttgcccgggccaggccgggcaggtccgggtcctcgggatagatccacgcagccacctcgtggttgtcatcgtggaagacctcggcgtccaggtcggcggggttgagccctccggcacgccaggtgagccccaccaactcgaggcgacggctaccgggccagttcacatcgcaggagtagagcacgctggtgccgcggccgggctggtggtcgatgtggtccaggcgcgccgagattacctcgccgccgcactggccgacggcggcgcgggcgaagtcgacgccgtcggtgctggtcagcaggcgcaggccgtccgggtcgggcgtcagcgcacggcgggcacgctggcgttcgcgtcgtggcgcacgtcgttcgaggttcatcggcactcgggatcccgcatcacgcggagctcgtgggggcgctggttcatgggcgttggatgttcatggacgctgggtattcatggacgctgggcgttgccgcccgggtcggccttgccgacgtcggtggccaccttgttgcgggcgagtgtctcggtgagatgggccaccgtgttcgggtcaccgtccgcggcgagctcggtggcgggcttggtcgccgcctgggccgcggccggttcgatgacgcctgcgccgagctcggctgtgtccgacagcgcacgcagccgcagccaggcgatgcggcgtccgtccatctgggtgacggtgagctcatagtcgtcgccgcggagcttctcctcgtcctcatcgtcgtcggagaccggggcgtccgagtcgagggagaccttgatggaatcgcccaccgtggggacctcgccgcgctcggtcatgaagaatccggccaccgtgtcataggggccctcggggatcacatggccggtggcgtcctcgaagtcctccagcgtcgtcaggccatcgatctcggacagctggcggtgcttgcgggtgtcatcgtccaccacgtcgtattcatcggtgatgtcgccgatcagttcctccaccaggtcttccagggtgaccaccccggcggtgccaccgtattcgtcaaggacgatcgccaggtgcgaatgggcccggcgcatgtccgacagggcccggggcacccggacggtctcgggcaggctcagcaccggccgcaccagcttcgagatgggggtgttgcggggcgtggaacccacgcccatcaggtcgcgcacgtgcaggaagcccagcaccctgtcgggcgagccgtcgatcaccggatagcgactgtgcggggcgccctgcacctcgcggatcgcctggtcgacggtcatattgcccgggaggaagtcaacctcggtgcgcggcaccatcacctcgcgcaggctgcggtcaccggcgctgaagacctcatcgacgatgtgcttctcctcggcgcccagcgaatgcgcgttgaccaccatcgagcgcaattcctcgtcgctgacgccctccttgccggccttcggatcgaagccgaccaggcgcaccaacgcattggtgctggctcccagggcccagatcacgggacggaagaccttggccagcccgttcacgatgggcgccagcaccagggccatcgtctcgggacgctgcagcgcaaggcgcttgctgaacagctcgctgatcacgatcgagaagaacgagatcagcgcggtgaccacgatcaccgcgagcactccggcaaggcccggcgccacaccccagcgggcgaaggcgggcgccacccaggccccggccaacgaatcggtgccgaaggccgatgacaggaagccggcgagcgtgacgccgatctgcacggccgacaggaagcggttcgggttggaggtgagctccttgacggcacgcccgcgcttgccgcgggtgctcagctgttcgatctgcgcatcgcgcagtgacaccagggccatctcggcggccgagaacacgccgccgatgaagaacaggacgaagatgacggcgatagagccccagatgggcatgtcagcaccgcctcagctgcacactggacgagggactatggccctccgcatcgggggatgactgggcagcggactcaagcttcacgtcttcgagaatagtcaaggcggctcgtcgggcccgccacgagccggggatggaccggtggtcaccgtgcggattcccgatgcccggccggcccggaagctccgtgatttctcagcagccgaccgtcccggggcagtcgcctgcgggcttccactagcctgaccgggtgcccatccccctgcgcgaacgcctcactcctgctgtgcgcatggggctggcgatctccgtggcgacgggcatgtacggcatctcgttcggagcgctggcggtcactgccgggctcaccgtgtggcaggcctgcgcgctgagcgcactgatgttcaccgggggctcccagttcgccttcatcggcgtgatcgccgggggcggcaccggagcggccgcgtggggagccgccaccatgctcggcatccgcaacggcatctatggcatgcagatcaaggccctgctgcgcccctcgagccggcgcatcccgttgatggcgcagatcaccatcgacgaatccaatgcgacggccacctcgcaggacatcctggccgagcagcaccgcggcttctggaccgccggggtcggcgtctatgtgctgtggaacctgttcaccctggtgggggcgctggccggggacgcgatgggcgacccgaagcaatggggactggacggggcggcctgcgccgccttcctgggattgctgtggccacggctgaagtcgcgcgacccgatcgccattgcggtggtctcggcggccatcaccgtgatcacgattccgatcgtgccgccgggcatcccggtgatcatcgccgccctggtcaccgcggtggtgtgggagtggcgacaccatggcgacggcgcaaccccgacgagggggccacgccgtgagcctgaccgcatgggtgctcatcgcgtccgcctcggcgttcgtgatcaagctcgccggatacctgctgccccgctcggtgctcgaccgtccgcaggtgatcgcgctggccaagatgatgacggtgggcctgttggcgtcgttgacgatcatgaacacggtgtcgtcgggtcagcgactcacccccgatgcgcgcctggtgtcgttgctcgtggcggcgatcgccctgaagctgagggcccccttcatcgtggtggtcctcctcggagccctggccgctgccctcggccggcttgccggcctgccttagtggacgagcccggctcgccggcctgccttagtgggcgagcccggctcgccggcctgccgtaatgggccggcccggccctgaggacaccaccgccccggcaggacaactcccccggggcgatggattcacacagcagacgactggcctgcgcaggcagggctcagcgcagcgcctcggccaggccgtcggacagggccttcatgaagtcctcggtgttgagatagccctgatcgcccccgaccaacgaggcgaggtccttggtcatccggccgctctcgaccgtcttcacgcagacgttctccagggtgtcggcgaaggcgaccaacccgggggtcccatcaagctcgccacgatggcgcaggccaccggtccaggcgaacaccgacgcgatcgggttcgtgctggtctcctccccggcctggtacttgcggtagtggcgggtcacggtgccgtgggccgcctcggcctccatggtcttgccgtcggggctgagcagcaccgacgtcatgaggcccagcgagccgaagccctgcgccacgatgtccgactgcacgtcgccgtcgtagttcttgcaggcccacacatagccgccctcccacttgagggccgaggcgaccatgtcgtcgatcaggcggtgctcgtaggtgagtccggcagcgtcgaagcgctccttgtactcgtcctcgaagatgcgcgcgaagatgtccttgaactggccgtcgtaggccttgaggatcgtgttcttcgtcgacaggtagaccgggtagtgccgattgagcccgtagttgaagctcgcgcgggcgaaatcctcgatcgacttgttgaagttgtacatgcccatggccacaccgccggcctcgggcatcttcacgacctccatctccatgggctcggagccgtcgtcgggggtgtaggtgagcgtgacggtgcccgcaccgggcagcttcacgtcggtggcgcggtactggtcgccgaaggcgtggcgcccgatgacgatgggcttcttccagccgggcaccagtcgggggatgttggagatcacgatgggctcgcggaagatgacgccgccgaggatgttgcggatggtgccattgggcgagcgccacatcttcttgaggccgaattccttcacacgcgcttcatcgggcgtgatggtggcgcatttcacgcccacaccgtgcttcttgatggcattcgcggcgtccaccgtcacctggtcgtcggtggcgtcgcgatgctcgataccaaggtcgtagtagtcgaggttgatgtccaggtaagggaggatcagctcgtccttgatgagcttccagatgatgcgtgtcatctcgtcgccatcgagctcgacgacagtgccttccaccttgattttggccatggggccacctttctcatctgatgcgtctgggcacaacctaaccgatgattccgccctgcacacctgttgtcgttgaatggtcaaattcgtggtccggcggggcccgccacccatccgggcattgcccgcaggcaagcgataggctcgcctcaaactctcatcgatgaggagaatcacgtgagcactacacccgtcaaggttgccgttaccggcgctgccggccagatttgttacagcctgctgttccgcattgcgtccggctcgctgctcggcgatacgcctatcgagcttcgcctgctcgagatcacccccgccctgccgcgcctcgaaggcgtggtcatggagctcgacgactgcgcattccccaatctcgccggcgtcgagatcggcgacgaccccgagaaggtcttcgacggagccaaccttgccatgctcgtcggcgccatgccccgcaaggagggcatggatcgctccgatctgcttggcgcgaacggcaagatcttcaccggtcagggcaaggccctcaacaaggttgcggccgacgatgtgcgcatcctggtcaccggcaacccggccaacaccaacgccctgatcgccaaggacaatgcccctgacattcccgacgatcgcttcagcgccctgacgcgcctggaccacaaccgcgccaagtcgatgctcgcgaagaagctgggcgtcaacgtgggcgaggtcaccaacatgaccatctggggcaaccactccaacacccagttccccgacctgttccacaccaaggtcggcggcaagaacgcctacgagctggtcaacgacgaagcctggtacgagaacacctacatccccgaggtcgccaagcgcggcggcgcggtgatcaaggcccgcggtgcgagctcggccgcctcggccgccaacgccaccgttgaggccatgcacgactgggccgtcggcaccccggccaacgactgggtctcgatgtcggtcgtctccgatggttcctacggcgtgccggagggcctcatcagctccttcccggtgacctgcaaggacggcaagtacgagatcgtccagggcctcgacctgaacgacttctccaagaagaagatcgctgccaccgtcgacgagctcaccaaggagcagggcgaggttcgcgagatgggcctcatctgattctgatcagatagttggcgcgcggcgcggccgcgtggctgacacgatgaatggcgggtcaccctcgggtggcccgccattcatcgttgatcggccgccatgccgccggggacaccagctgccccgggcacgtgtgtgccccatggacagtgggaatccgcctgacgcgggcccggcccgctcagcgttcgaggggcggcacgaggatggccaggacgcacatggtggtgccccccacgatgccgacgagtacgtcgaaccagcgccgacgcaccaccagcagcccggcgagccgcggcggcaggaagagccgcagcactccggcaagccccagcccggcacccatcagcacggcaccacgacgccaatgggcggcggccgtgatggccattccggccacgaagaacgccaggcacagcagcaacggccactgggcacgcaggcgatcgagcttcagcggcgcggcaaccggccgcttcgtgctgctcggcggggcgggggtcatcgggactactgctcctgggcggcgatctgctcggcgcgctccaccacgttgaccagcaacatggcacgcgtcatcgggccgaccccaccgggattgggcgtcacatagctggcgacgtcccacacatcggcggtgaagtcacccaccggcttgccctcgatgcggcgcacgccgacgtcaaccaccacggcgccgggcttgagcatcgaggcggtcaccagcccgggatgcccggccgcgccgatcacgatgtcggcctgccgcgtctcctcggccaggttcttggtgcccgtatggcacagggtgaccgtggcgttcacatcacgacgggtcagcaggaggccgagcgggcgtcccacggtggtgccgcggcccacgacgcagaccttggcgccgtccagcgggatctcatagcggcgcaacagctccacgatgccgcgcggggtacacggcagcaccccggagcggcccagcacgagcttgccgaggttgtccgaggtgaggccgtcggcatccttgtcgggatcaatgagctccagggcccagttgggatcgatctgcgggggcaacggaagctgcacgatgtatccggtgcacatcgtggagtcgttgagcacgcggatcgaccgttccacctgctccggcgtcgcatcggccggcaggtcgacgcgatatgactcgatgcccacctgctcgcagtcgcggtgcttgccgttgacatagatctggctggcggggtcgtcccccaccagcaccgtgccgagccccgggttgacgccctgctcacgcagggcgtcaacgcgttgcttcagctcgatcttgatctgggccgcgacggccttgccgtccagtctctgcgcagtcatggatcccccttgatcggttggctgtgtgctcatgggaactgtccttgtggaatctgatccagtgtgggctggttcagtggaagaaatggcgattcccggtgaagtacatcgtgacgccggccttcgacgccgcctcgatggtctcctcgtcgcgaatcgacccgccgggctgcacgatagcgctcacccccgcatcgagcaggatctggggtccatcggagaaggggaagaaggcgtccgaagcggccacagaacccttcgcccgatcacccgcgcggctcaccgcaaggcggcacgagtccacccggttgacctgtcccatgccgacgcccaccgaggcgccgtcgtgggccagcaggatcgcattcgacttgaccgagcggcaggccttccaggcgaacagcaggtcggacagcatcacggcatcggcggccgggccggcaacgagcttccagcccgaggtctggtcgccgggggcgtcgaggcgatccgggtcggaggccaacaggcccccggagatctcacgccacaagaacttgtcgaagtggaagtcctcggccttcaggatgcgcaggttcttcttggtctgcagcagctccagcgcggcgggctcgaagtcgggggccacgatcacctcggtgaagatgggcttcacctgctgcgccatggccagcgtgacgatctggttggccgcgatcacgccgccgtaggccgacacgggatcgcaggcatgggccttggcatgggcatcggcgatgtcggagcccacggcgatgccacaggggttggcatgcttgatgatcgccacggccggacccgagaagtcgtaggccgcgcggcgggccgcatcggcgtcggtgtagttgttgtagctcatctccttgccacccagttgctcggcgcccaccaggccgggggcagcaccctcggcggcgtagacggcggcgcgctggtgcgagttctcgccgtagcgcaggtcgtgcagcttggtggctgcctggccgatgaagccgggcaggccctcgtcggtggtctgttcggcgaaccagctcgccaccgaggcgtcataggcggcggtgtgcgcgaaggccttcgcggcgagcgcgcggcgcgcggccagggtgaagccgccctgcgccagggcgtcggtcagctgggagtactggtcggggctggtgatgatggccaccgacggatggttcttggcggcggcgcgcaccatcgagggtccgccgatgtcgatctgctcgacgcattcatcgaagtcggcgcccgaggccacggtctggctgaacgggtagaggttgctcaccaccaggtcgaagggcttgatgcccagctcatcgagctggcggcggtgggactcaaggcgacgatcggcgaggatcccggcgtggacggcgggatgcagcgtcttgacgcgtccgtccagggtctcggggaagccggtgacctgctccaccggcaccacctccacaccggcctccgacagcttgcgggccgtcgagccggtggagacgatctcgacgccggcggcggccagggcacggccgagctcctcgagcccggtcttgtcatagacgctcaccagtgcgcggcggatcggggcccgggtgggatcagtcatgtgatgcctctccttgtgattcgttggctgcaacgctcgtgcggtcaggcgctgctgtgtcaagcactgctcggtcaaacactgttgggtcaaacaactgttgggtcaaacacttgcgggatcaaacactcgtggggtcgccggcaggcgcgcgccgggccagctcattgacggtggccaccagcagtcgccgctcggtcaccttgatgcgctcgtgcagcgtgtcctcgtcgtcaccggggcgcacgggcacgggctcctgcacgatgaggctgccggtgtcgacgccgtcgtccacccagaagatggacgatccggtggtggtggccccggcggtcagggcatcgcgcaccgcgtgggcaccggggaaggccggcagcatcgcggggtgcgtattgatcacgcgcccggcaaagcgacgcatgaagggctcgccgagcagcttcatgaagcccgcgagcacgatgaggtccggtgaacaggcgtcgacggcgcgggcgaactcctcgtcccacgcctgccgggcggcgctcccgcggggcagcagcgtggtcatcggcacgacgaaggtgtcgaccccggcgtcctgcgcccgtgccagggcccggcaaccgggttgatcagagcccacggcgacaatgcgcgcatcgagtgcgcctgcggcctgtgcgtcgagcaatgcctgaagcagtgtgcccgacccggagacgaggacgacgactcgataagccacgcccggaagcctacccttcgtcgccgtgcaccgggtccgctgccccgctgccggaatcggtggtcggtgccgcgtcggtggtgtcgttgtcgtcgggccgggacgccgtgggcaccgtcgcctccccgcgacgacgcagcagggcacgcagcgacggacgcttcgcgcgggtgcctgccggttggggagcagggctcggtgcggcagcgccgcgacgtgcgatgagcttgaacacatgcatggcgccgtaaccggccaacaggccgccggcccccatcagggtgggggcgagcaccacgacgcgggccatcatcggcccgacccggcgcaggcgctcaacgcccagtgatccatcgctgaacgcgatgagcacgcaggcgagcaggcccgacaacacgccgatgcacaccccgcacagcgcggcggcctcggtgctcatcctgcgtgggggcagcgcctgggtggcgttgttgtgtcgtgcgcgcacggcgacgaaggcacccagcgcgccggcaagcacgccgacgagcagccacgcaaggcctgccgacgagggggcggcgccgctgggcagggcaccgaggatcggaaaatcgggggtgggacccaaccgggacaccaggggggtgagcagggtgtcgtcgccgacggtgaatccggctcccagcagccaggctgcggtccacagcacggcattgggcacccaggcggcttgcccgatcgcgaggacggctcccccgagcccgcccgggttgagcgcattgtgcagggcgcccacctggccgtgccgggcaatcagtgcgatgagcagcaccagggcggccaccccgatcagggccgccaccgcagaccagacgccggcgatcacaccgcggatccaacccccctggttgaagctgatgacactccaacccagcgcgcgtccggtggtgatcagcgtgatgggcccgcagatcaccaatccaccgatcagcgcgcgtccgatctgggcggattcccccgtggcactggccgcaacggccaggatcgccatataggggacggtgaaccacacggtcatgcgcagggcgaggccgcgggcctcggcgtcctgacgttcggtgcgggcacgtccgccgaaggcacgcgtggccaggtgacgggcgatggtcatgacgaaactggtggtcaccagcatcaccagcagggcgaagcccagcgggatcactgacacccggacgccctcgatggtcatcgggacgccgtggccgagcagccaggcatgggtgccgaattcgagcacctgcgcatagctggactggctctgcgacagccagccgagcgagcagaacgcggtcacgatgatccagctcgccagtgcggtgccgactgccgacagggccgtggtggcacgccatggcagggttcgcgcccgatcgcgcacgctggtttcggactcctcggcgtgcgtctcgagcactgccgtgcgagttctcctgcgccttgccatcgtcacctccgccactaccgctggaacactatcgaaaggggcgcccctcccccgcggtgccgtgccgaggggtgacgtgccgggtgccgggcgctagagcttctccagcggagcgaagcgcagtgccagccgcttcacgcccgccgagccgaagtcgacgtcggcggtggcgttgttccccgaacccgcggccgccaccacggtgcccatgccgaagctcgagtgcagcacccgatcgcccggctccagggaggcgacggtcttggtacgtggtaggtcgccgtgccccgacccgaacaccgggccgcccgtgctcgtctgccggcgggccgacgcggtacgcgccgaggccgatgaaccccaactggtcaggtcagcgccggtgcgctgccaatcgatcagttcggcggggatctcctccaggaagcgactgggcgggttgtactggggctggccccatacggtgcgcacggccgcacggctcatgaacaggcgtcggcgcgcgcgggtgatgcccacataggccaaccgccgctcctcggacagctcggcggggtcggccagggcccgcatgtgcgggaagatgccgtcctccatgccggtgaggaagacattgtcgaattccaggcccttggcggtgtgcagcgtcatgagggtcaccaccccggcggagtccggatcggaatcggggatctggtcggaatcggccaccagggcgatccgttcgaggaaggcacccagggagtcatcggcctcgggcatgccggccaccagttcgtcggccagttcgggggcatcctgatcgccgggcgcatcgggccgctgcccagccgacaggtcgagggtgtgggcctgggcgacgaattcctgggccacggccaccagctccacgaggttctccacacgggtctcgtcctgggggtccttggagtccttcagctcgtcgagcaggcccgagtccttcagcaccgcggccacgacctcgtcggccgatgaccctgccgccacgagtccgcggaaaccggccatcatcgaggcgaaggactccacctgatggcgcgaacgggtggcgagtccgggcacctcggcggcacggtccacggcctggctgaacgggatcgactggctcacggcgaacatctccagcgcggtctcggcccgggcaccgatggcgcgcttgggcacgttgatgatccgacggatcgagacatcgtcggccggattcgcgatggcccgcaggtaggccagcgcatcgcgcacctcgcgtcgctcatagaagcgcacgccgcccaccacccgatagggaaggcccagccggatgaacacctcctcgaaggcgcgcgactgggcattggtgcggtagaacaccgcggcgtcggaataggcggcctgctggtggtcgtgcagctcgtcgatcttctcggccacccagcgggcctcgtcatgctcggtgtcggcaacccaaccgatgatcttgtcgccatcaccggcgtcgctccacagcttcttcaccggacgcccggagttgtgctggatcaccgcattggccgccgacaggatggtctgggtggagcggtagttctgctccagcaggatcgtgcgggcccccgggaagtcctgctcgaagtccaggatgttgcgcacatcggcgccccggaaggcatagatggactggtcggagtcaccgaccaccagcagctcgggcggatccacgcggggggcgtcgatctggtcctcgttgggcgcgcagagctcgcggatcagcaggtactgcgcatggttggtgtcctggtactcgtcgaccagcacctgacgaaagcgacgacggtatttctcgcggatatcggggtggtcgtgcagcagttgcacggtgatcatgatgaggtcatcgaagtccatcgcattggcgaccctgagccgacgctgatattcctcgtaggcttgcgcatacagttcctcattgccgttgtcggcctgctcggcggcggcgccggggcccagcagctcattcttggcattgctgatccagcccatcacggtgcgtggcgggaacttcttcgtgtcgaggttctggtcgcgcaacaccagggtcatgagccgcttggtgtcggtgtcgtcgtagatggagaagttgcgccgcaacccgagctcgggggcctcggcaagctcagtgcgcaggatgcgcacgcacgcggagtggaaggtgctcacccacatcgtgcgggtgcgcggacccaccagctcggccacccgcgagcgcatatcggcggctgccttgttggtgaaggtgatggccaggatcgagccgggatgcacgccacgctgggcgatcaaccaggcgatccgacgtgtcagcaccctggtcttacccgagcccgcaccggccaccaccagcaccggtgagccctcgtgcaccacggcctgttcctgcggcgggttcaggccgtgcagcagggcctccgcgtcgtcgtgggcgtcgtggggggtgtggggagcgaagccttcgccgctacccggcgctcccaacgccgacaggcgctggtcaaaggcggagaacaggtcgggaggggtctggtcagtcatggccgctcaagcctatgctgccggccggcgccgcacacatcgcatccactgccccgtcgctggggcgggacgaccatccacagggtccattcggcccggtgagccggggcgcccaccggcacattagagtgtgcgcatgcgccttcctcctgccaccggccgcgttgtccgcaatgccctgttgggcattctgggcgcccaactcggcgctgccggcgtgctggtggcagccgacaatgtgcgcaagcatcgggcaggccctgcccgcttcccgcgcagtgccgtcacccaggccagggccgacgacgacctggtcagtgtctattcctatggcgaggacctgtacaacgacatgctcaccgccatccggcgggcgaagcacacgatcttcttcgagacattcatctggaagaacgatcccattggccaggatttcaagcaggcactcattgaggccgccaatcgcggtgtggccgtttacatcgtctatgaccaattcgccaacatggtggtgcgcccgtcattcttccgctttcccgacaacatccatgtgaagcgccatccgttggtgcagtcggtggcgttctggaatctgcgcaattcgggacgtgaccatcgcaagatcctggtggtcgattccagggtcgccttcatgggcggctacaacatcgggtcacgctacgcccgcacctggcgcgatacccacgcccgtttcgagggtcccagcgtcgccgacttcgagaatgccttcgtcgactactggaacctgcgcccggtgcacctgttgtcgagccagcgctcgtcgatgcccgaattgcccgatacgagccagcgtcgttgggacggctcggttcggttgtcgcgcaatacgccgcgctgggcggtcttcccgatccgcaatatgtacctcgaggccatcgacaaggcgcagcgcaatatctggctcaccagcgcctatctgattcccgacgacgacctgcgcaccgccctggcgcgtgccgcgcagcgtggcgtcgatgtgcgcatcatcgtgccggcgcagtcgaaccacgtgattgccgactggctgtcgcgcggctattacaccggcctgctgcgcgacggcatccggctgttcctgttccacaatgcgatggtgcacgccaagaccgccacgatcgacggccactggtcaacgatcggcacggcgaatatcgatcggctgtccctggcgggcaattacgaggtgaatgccgagatcaccagcccccaagtggcaacggccctcgagcggatcttcctgaccgaccagtccaattgcaccgagatggacctggcccgttgggaacggcgcagcatcgtggcgaagggcaccgaatggctgctcgcgccctggcgccccctgttctgatcccggtcccaatctgacgggaacagagcccgacgggaacaggggccggcgggaacaggggccggcgggtggtcagtagtacaccgccagcggtccgtgggggccctgcaccacatccaccggggtatcgaagacctcggtgagcacggcggaatccatgatctcgtcggaaggcccgaaggccgccactctcccgtccttcatcgcgcagatgtggtcggcatagcgtccggcgaagttgatgtcgtgcaacacgatgacgatggtgcgtccgagctcgcgcgccgcccggtgcaggtggcgcatcatctgcaccgaatggcgcatgtccaggttgttgagcggctcgtcgagcagcacgtactcggtgtcctgggccagcaccatcgccacataggcacgctgacgctgcccaccgctcaactcgtcgaggtagcgcgcttcgaggtcacgcagcgccaggaagtccagggcctggtcgaccagttcctcgtcggcggcactcaggcgtccatgggtataggggaagcggccgaagccgaccagttggcgcacggtcaaccgggtgacgaagtggttctcctgttgcagcaccgacaccacccgggccaggtcggccgacttggtgcgcgccacgtcgtagccggcgatctcgatcacgccggtgtcgaggcccagcagccgtccgatcatggtgagcagggtcgacttgccggccccattgggccccaccagcgcggtgatgccgccgtcggggatgtgcaggtcaaccggaccgatgcacacctcggggctgtatttcttgagcacatcggcaagcgcgatcacagtcggccctttcgtagcaggacgatgaggaaggtggttccgccgacgagctcgatgatcaccgacaccatgccctgcgcgtagaacacatagcgcatgacgaaataggcgccggccaacaccacgaagccggtgagcaccgcgacggggaagatgcggcggtggtcatgggtgccggcgaggctgtaggtgagggtggccaccaggaacccgaagaaggtcatgggccccaccagcgcggtggacacggcgatcagtaccgagaccagggtgaggcccagcatcgtctcgcggcggtggttgagccccagccccgtggcggcggacgcacccagcgccatcacgttcaggcgttggctgcgcacccacaggccgagcccggcggccaggcacagtggcaccgccaccggcaggtaggacgcctcggcgttggagatgttgccgaacatgcgggcgctgagcacgtcgaattcgctgggcgacagcatgcgctgcatgaacgtggccaccgatcccaggccggcaccgatcacgatgccgatcaacagcatcacctgcaggttcgcatggcgtccgctgagcagggtgccgtagagcgccacggccagggccaccatcaccgccacctggatcaggaactgtggcaccccctgcagggccaccacgccggccacgcccaggaagtagaccgcgctggtctgcaccgcgcggtagagcgactcgaagcccatgatcgacggggtgatgatgcggttgttcgtgatggtctggaaggcaacggtggccagcgcctggctgaacgccaccacggcgatcaccaccaggctggccaggcggcgttgggcgatcttccagaatccccgggagcccaccggcatcggattggcccaggccaacagcccgaaggacgccgcaaccgctgccacggccaggccgaccacgaccaccaggtagcgacgtcgggccgcgcgggtggcgaaggcgccggtgtgcgtgcgcaccggcggggtttcccgggtcggggtgtcgacgaccatgtcgctgccggggccccccactcccccggctggtccggggcgtccgcgccccacggcttcggtctgcgcgtcagccacggcgacgctgcctcagcaggagcacgacgaagaccaccgacccgacgatgcccaggatcagggagacggggatctcgaagggcatgatgatcacgcgtcccaacagatcgcagacggtgaccaggccgatgcccagcaggcagacccacggcaggttcgagcgcaggtcgtcaccgcgtgccagcgagacgatgttgggcacgatgagccccacgaagggcaggtttccgaccaccacggtgaccacgccggtggcaaccgccaccaggccggtgcccatcaggatgatgcgctcatagttcatgccgaccccggtggcgaccgacttgccgaggccggccacggtgaagcgatcggcgaccaggaagatcgccactcccaccgctgcgacgacccacaggatctcgtactggccgcgcaggatcgaggtgaagctgccggcgaaccagacgcccaggctctgcagggcgtccatcctgatggcaatgaaggtggagatcgatgacaccacggcgcccagcatgatgccgacgatgggcacgatcagcgacgacctgagggtcacggtgcgcaggaaggcgaagaagaccatcgtccccaggaaggccgccacgacggccacggccatcttggtgccgatactggcgttcggggcgatcaccatcaccaacagcagccccaatccggcccattcggtggtgccggtggtggtgggttcgacgaagcggttctgggtgagcagctgcatcacgaggccactcatggccatcgcggcaccggcgaggaccagcgcgacggtgcgcggcacgcgggtgatctggaacatccgggaaccatccgaggccccgaagacgtcgtagacgccggtggtcagcgacagcaccaacagcccggcgaccaccacgatccccacgagcagcttggggtcgagcagcttgcggtccggcaccggcccggggcgcggtggtccgccggacgcaccgtggcgcgtccggcggaccggggtggcatcaggcaaggtcacgcccgggattccagcgctgcggcgaagtcgttgaggaactccgtgtaggtctggctcgactcattggtgtagatgtcggcaggcatcgtgacgatgttgccctccttcaccgcggtcaccccggccagggcctgggagttcttcaacaactcgctggccggcttgtacgacggatcgtcggccgagatcgccgcatcgcggtccatcaccaggatccacgtgggattggagctggcgatcgcttccaccgagatgtcgtcgcccttgtgatccttggacgaaccctgcacctgcagtgccggcgtcaggcccgcgaagtcatagacgggtccgagcgcgcgtcccacatgtggcgcgatgaagccgatctcgccaccggaggtgttcaccgccatcacggtgtcggcaggcttgtatgccttcttgacccgtgcgatggcgccgtccaggtcgtcattgagcttcttggcctcggcctgcttgccgaagacctcgcccagcacggtggtctggcgcttcagttcctggtcgaagggttccccatcgcggggatccaggtcgaggatggtggtatcgggcaccagcgacttgatctcgtcggtgtactgggtgaagcgttgcccgttgatcaccagatcgggcttggccgccacgatggcctccaggttcggctcgcggtggttgccgatgtccacgatggacttgtcggtggtgtacgagatggtgctcggcatcagcgacacggccgcggccttgagaccgacgccccactgggacagcgtctcgaaggtgcggttgtccagggcgacgaccgactgcggtggggtcgtgaccgtatgggtgccgttgttgtcggtgatctcgatgctcgacagcgcggccgcgctgtgggtggcaggtgatgtatcgctacccgcgccggatgaacaggcggtgagtccgccggccagcagggccgccgacagggcgaccacggcaagggttccacggttcgtgaaccgggtggatgacatagggctctcctctgagaatggggaggggacgtggtgtttcgtgagcgggtcattgcacagcccaccaacaggtgggacccacattaggtgaggctaacctacttccttgcgagccggcacgcgttgccctgtcggggtggcgtgcagctgcgcagccccatcgcaggtcgccagccgcaccgggcaccgcaggatgaggggtcgcaatgggtccgggacagggggatcccggggttcaggtggaggggcggtgcactcagtgcacaccccggtcggttagcatgaaaccatgggactaatttcttggatcatcctgggcctcatctgcggcaccatcgccaaggccatcatcggcgggcgcgctggctggatcagctcgttgatcgtcggcgtcgtcggtgggttggccggcggctggctcggcagcctgctgttccaccgcccgctgtcgggcttcttcagcccctggacgtggctgttgtccgtcgtcggcagctgcctggtgctgtgggtctacaacaaggtcagctcaaggagctgacccacggggtctgcaacggggtcagcccaacaagctgacccactggatccaccacaggtcagcccaacaagctgacccactggatccaccacaggtcagcccaacaggctgacccacgggatccaccacaaggtctgcccacggggccgatccccactccacatccccacctcatgcatcacgccgggcgcgcatctccacgatgtgcacccggcgtgatcgacgttgcggggtcgctagacgagcttgcggtcggtggcccacttggtgagttcatggcggttcgacagctgcagcttgcgcagcacattcgacacgtgggtttccacggtcttgatcgagatgaacagctcgcgtgccacttccttgtaggtgtagccgcgggcgatgagcttcatcacctcgcgttcgcgctggctcagccggtcgaggtcctcatcgatggattccaccgagatcgatccgctgaaggcgtccagcacgaagccggccagacgggggctgaagacggcatcgccggtggcgacgcgcccgatggcctccaccaggtcggcggtgctgatcgacttggtgacatagccacgagcccctgcgcggatgacggcgatcacgtcctcggcggcgtccgagacagacagcgccaggaaggtgatcttgggatcgatctggtgaacctggcgcaccacctcggcacctccgccgccgggaaggtgcacatcgagcagcaccacatcgggcgtggtcccggtgatcaccttgaccgcctgctccacgtcgccggcctcacccaccacgtcgatctcgtcgggtgcggcggcggtcagctcgtggcgcacgccggcacggaagatgtcatggtcatcgaccagcaccacccgccgggggccctccgggcgcggctcatcggtggtcaggggtccgggcaggctcgtcatcgcgcaatctccagtttcacctcggtgccctcccccggtgcagagcgcacctgagcggttccgccgtggcgttccatacgttcgatgatcgatcttctcacacccatccgatcggctcggatctgctcggcatcaaagcccacgccacgatcgcggacgaacagttcgacgtgatcatcgtcgacctcggcatagacgtcgatgtggtcagcgcccgaatgcttcgcggagttcatcatggcctcgcgtgccgcgaggatcatcgccgacaggccgtcgttcagcgtggcatcgcccacgcagatcacctcgacgcgcactccgctgctgtcctcgacctgggcgccggcatcgcgcaacgccgcgcggaagtcccgggggccgggcgcctccccgtagagccactcgcgcaactcacgttcctgacgtcgcgcgaggctggccacggccttggggtcatcggcctgacgctggatcagggccagcgtctgcagcaccgaatcgtgcagatgggcggccatgtcggcacgcgcatcagccaccagcttttcctcgtgggcacgtgccaggttgctgcgcatccggttcatccagggcgcggtgagcaccccgaagccggccagggccagggccaccatgcccagcactgccggcagataggggccgtccacctgggtgtaggccaccaggagcaccgaggcccccaccagggtcatccccaggcccatgcgcaacaccgtggcccacttggaactgctcaccaggggcgccatccaacgtggcacgagccggtcgggttcctcctcgggctggtcggcctggcgccagacgagtccgatacccacggcggccagcaccacgggccagaagaaggcatggatcgagccgagaccgaacagccggctcaacacgagcagccccaggcacagcagcaggaccagcccgatggacagccacacctccaggtcctggcgccgcgagctgcggggcttgcgtgccggacgcaccgcccgggcctgttcggcggcctcgtccttgatcggcaggaaggcccacaacgcggcgtaggcaaccacgccgaggtaggcggtcatggccagcaacacgaagcacaaccgcaccggccacaccggggagccgaggtagtcggcgatgccggtgcagaccccgccgagccagcttccgcgcatcctccgcgccaggcccgccggccagcgcggtccgcggccggccggatgccccgacgcaccgtccggccaggagggcacggcgccgccaggagcgttcatgcccgtccgcggcggctcggaagacgtgccgcgctggcgtgtggatcccatgtcgtgccgcctcccttcaggttccccgtggaccaatggtgccaattgttccatccgacccacgcggcattcgtcggccggcacgtgaatccgggacgggccgccccctgtcccccgtcgggctgacccggcaagcagggtgcgttcagggtgcctccctgatgaaattgagtgcgatcggcgcaagaattgatccatgcgcaccgcaggggcggtgcagaccccgatccaggaggaacccatgggcaccaagcagctggtacgtcgccacgacaaccgttggattgccggggtggccggcggtctggccgactactggggcatcgatgcactggcggttcggctcggtttcatcatccttggcctggtcaccttcggcaccgccttctgggcctatctgatctgctggctgttgatccctgacggcgtggatggctcgaagggactcgatgcggtgaagcggacgatcaacggcttccgcgacaagaacgacgggccgcaggacttcaacccctacgacgacaccaagtaggcccgcacagcacaagacctgcgtcgaccgtcaccccggtcggcgctcccccattaccttgcggcgaacgtcaccccgttcgtcgcttcccacaagcaacgcccgaatcccgactgtggtgagcgggactcgggcgttgctgcgtgatggaacagggcggtcggttcctgtcggctgcggccccagcggcgccgcagtagcctgaggtcacgatgggttcgccccgtgcacgtgtccgcccacactgaaccggcaccgggcgtccgttcgatccgacgcgcgatggcggggtgacgatgatgttggcaatggtgctggaccatccgggaggcgcagacaccttccgccctgaggaacgtcccattcccgaggcgaccgccacgcacagcgtgctcgaggtcatggcgttcggcgtgaaccatgccgacctgatcacgcgcgccggcggttcccccgatgtgcggttcccccgggtgatcggcatcgaggccgtcggacgggtgcacgccacctctccggcgagcggacttgaggtggggcaacgcgtcgtgacgctcatgggtggggtgggacgcgacttcgacggcagctaccaggaatatgcgctcgtgccgaactcccagctgtatccggtgggcattgagatggcgtggaatcggctggccaccatccccgagagcttctataccgccctgggttccctcgaccggatgcacctgacggccggtgatgccctactgatccgcggtggcaccagcagcgttggcctcgcggcgatgcaactcgccaagtcgttcggcgtgcgggtgacctccaccacgcgtagccccggcaagattgcgcgccttgaggccctgggggctgacgaggtgctcgtggacgccgggacgctgcccggcaccgaacggttcgatggggtgctcgaactcgtgggggcggccacgctggatgactccatggggcatgccgcgccccggggctgcgtggtggtcaccggcgggttgggaggccagtggacggtgcccgactttgatcccttcagcattcgcgggtacctcacgaacttccagtccaccgaggtgaatcccgccctgctgcgccacatgctcacgctggtggcgcagcagggcctgagcctgcccatcgtcggggaattcccgctcccggacgtcggccgggcccatgaggcgctggagaccagcaccgagatggggaagatcgtggtcagcgtcgcgcactgagtgcgcgcagacgcccgccccgacgccggaccgtcactcggacgcccgggtcatccgcactgcaggatgagccaggccttgtcaaaatcacggcgggccaggtcctgcttcttgatccagtaattgatgtggccgacatcgccgaattccaggccggaatcggtgcccatctggaacaacagggtccagtccctgctggccttctcgatgtcgtcgcgcagttcctgggagatctcctcgccctccgcgccgtcagccatcccccgcgtgaccatttcgcactcggcctccatcgggttctgcaccacgtccgggtggccgagcagtttcgtggtgaccgcatcatcgccctcggatggtgcgccgtactcctcgcgcatcgcgtcatagtcctcccactcgatgtccgtcaggggcacgggcagcgggttcgtcctacgcacttcctcggggagctcggtgaagcccaaccaggccggcaggtccaccatgttccggtatgagatggcctggccgtcggggaaccagtcgtccaggtcgtcaggcaccgatgcgggccgcaacgtcgccgggtcctcgaagaagaagaccctggcggagcccttgtcccggggatcaaagccccattcctgggtctccatctcgtagaagaagctcagcacgcctgcggtgggaagcagtccctcggtgtcatagcgggtcgcgtcggcaaggttgacctgggccaggaaggtcaggggtcgattggcgtcggcagaatcgtcgtccttgtcctggaagcggggccactcaaagtcccggggaacgtcaggtcggccacccagccggctctgtcctgcttccccgggctcgggatcggctccgaaatccaacttgatcgcattcttctgcaccgcgtcgaacacgccgaacagggcctgcttcaggtcttggctcatggaaatccttcatcttcggcggggttgcggcgcaattcccccggatatgtcgatggcacatcgtggtgccaacgccgccctgcagccgcgccaacgattcatcggcacgaatgggacaagtctggcaggcgccactgacaaaactgacgccccggccccgctgggaggcggggtcggggcgtcagggcctgcgtcaggcgtgggtcattcccattcgatggtggccggcggcttgctggtcacgtcaagcacgacgcggttcacctcggggcactggttggtgatgcgggtgctgatcttctccagcaggtcgtagggcaggcgcgaccagtcggcggtcatggcgtcctcgctgctgaccggacgcagcacgatcggatgcccgtaggtgcgtccgtcgccctgcacgccgacggagtgcacgtcggccagcaggaccaccggcatctgccagacctcgcggtcgagcccggccgcggtcagctcctcgcgcgcgatcgcgtcggcctcacgcagcaggtcgaggcggtcctgggtgatctccccgacgatgcggatgcccagccccggccccgggaacggctggcgccacaccatggagtcgggcagtccgagctcggcaccgacggcacgcacctcgtccttgaacagggcgcgcagcggctcgatgagggtgaactgcaggtcgtcgggaagcccgccgacgttgtggtggctcttgatgttcgccgcgccgtcaccgccgccggactccacgacgtcgggatacagggtgccctgcaccaggaagtcgatgcccttgtcgccggcgatctggcgcgccacgtcctcgaagctacggatgaactcgcgcccgatgatcttgcgcttggcctcgggctcggagacgccggccagcgcggacaggaagcgctcggattcgtcggccaccaccaggtcgacgccggtgatctggacgaagtcgtgcttcacctgctcggcctcgcccttgcgcagcaggccgtggtcgatgaagcagcaggtgagctgatcgccgatcgcacgctgcaccagcgctgcggcgactgccgaatcgacaccgcccgacagggcgcacagcacccgcttgtcgcccacctgggcgcggatcctggacacctggtcgtcgacgatcgagctgctggtccacgtcggcttgcagccggcgaagtcgaacaggaagtgctcgatcacttcctggccgcgttcggtatgggccacttcgggatgccactggacgcccgcgagcttgcgctcgggcgcctcgaaggcagcgatcggagcgccggcggtgcgggccaacgacgcgaatcccgcgggggccgcggtcaccgagtcgccatggctcatccacacgctggagatgtcgtcaaggtcgtgcaacagcacgccggtgtcgtcaatggccacgctggtgcgcccgtactcggaggttccggtgtgctcgacggtgccgcccagggccccggccatcagctggaagccgtagcagatgccgaacaccgggataccggtgctgaacagggcggggtcgaccttgggcgcatcgggcacgtagaccgacgccggtccgcccgacaggatgatggcggtcggcttcttggccaccatctcgtcgacgctcatggcatgggggacaatttctgaataaacatgtgcttcacggacgcgtcgcgcgatgagttgcgcatattgcgccccatagtcgacgaccagcacaagatcatggctcgcaggcatgatgcccagtctattgcgtgcagcgcaagagccccggccccgcgggacccatggacgcgcagtgcagcgccgcaccgtcacgttcgggtgccccccggccacgggcattcacacaaccatgcagcgtgccaggacgttgaccgccccgcacgagcccgaccgccgtcaacatgtcaaccacgccccgccgaacatgacgacggcagtgccggtcggccatttctggtgacctgcactgccgtcggtccgacacggacggggggaaatccgtacgatgtgcgacgccgctgcgcggctagtcgttgtggtcgcgcttcaccaccgctcgctgcagcagcacgaacagcagcaggatggcgccggtgatgatggtggtcgcctcgggcgggatgctgccgtcacgggcgatgagcacattcatcagccccagcacgagcgcgccgagcaccgatccgagcacatagcccgccccgcccagcagcagggtgccgccgatcaccacggcagcgatcgcatcaagctcccagccgacgccggtcacgttctgcgccatcccgagcttggaggtgtacaccaccgaggcgatgccggcgcacaatccgctgatcacgtagatgaggtacttggtgcggttcaccggcaggcccatcagctccgccgagggctccgaaccaccaatcgcatagaccgtgcgcccggtgcgggtgcggtgcaggatgaagaagccggccacgaccaccaccacggcgatcagcacattgggcgtgatcaccaggtcattcaccttcggaccgtcgatcaccttccactgggtggccagggtgcggaaccccgaggcgtcgtccagtcggatcggcgtggtgctcaggatggacgccaggccgcgcgccaggaacatcatcgccagggtggcgatgaagggctgcaccctgaagtactgcaccagcacgccggaggccagcccgaacaggccacccaccaccacgatgatccccatcaccaggacgggattccagccggcattgagcagctgggcgcccagcaccgagctgaaggcgatcaccgcccccaccgacaggtcgatgcccccggtgaggatcacgaaggtcatgcccaccgccaggatgatcaggtgggcgttgttgatcagcaggttggaggccgtgctcatcgtcagggtctggccgtaggccgcctgcccgtagatgatcatgatgaggaagatgaccaccgacgcgagggtcgggatgcgcttgcgatcgatcttgagccagctgggcagtgcgcgtgtgggcaccgccgcgttgagtgtctgggcgctcatgccgccaccacttccttgacctcttcgacccgtgccggagcggcctcgaccacgcgtcggctgcgcttgagggtcttgaacagattgcgcacccgctcggactgcagcaggcagacgatgatgatcactgcggccttgaacgccggcgtggccgccgagggcacgttgaggaaggtcacggtgcggttcagcgtggtgatgagcagcgcgccgatggcgctgccgcccagtgagaagcgtccgccggccagcgaggtgccgccgatgaccaccgcgaggatcgcgtccatctccatgtccatgccggtcttggagacctcgacggtcatcacgttcgccgtggcgaacacgccggccatgccagccagcaggccgctgatcacgtagacggagaacaggatgtacagcggcttgatgccggccatgcggctggcccgctggttgatgcccaccgattcgatggtcatgccgagggcactgcgccgcaccacgagcgccaccagggcgacgatggcgatggcgatcacgaacgccacggggaacccgaacacggttccggtggagatccacgcgaagccgtcgctgcgggccgaggtgttctgtcccccggtgatcaccttggcaatgccgcgtccggtcatcatcatgatcaacgtggtgatgaagggctggaggcccaccacggacacgagcaggccgttgatggcgcccaggagcacggtgaccagcagggacagccccagcgccgtgagcacggcgccggtcgatccggaatgggcggccgatgcgaggaactccatcgacacggcacccgacactgccatcagcgagcccaccgacaggtcgatgcccgccgtggcgatcaccagggtcatgccgatggcgatcatgagcaccggggcgctgccccgcaggatgtcgatcagggagccgtagaggttcccgttgttgaccgtgatccggacgaaggaggggtccttgatcacgtcaaccatgatcagcaggagcagcgcgatgatgccccagaagtactggttcttgacgatggccttcatgctgcctgaccgtcctttgcgatgatgtcgacgatggtgttcgcgctgacatccggcccgttggtgatcgtcgcgatcgcccggttgtccttcagcacgaggatgcgctgactgaggcgcaccacctcttccagctcagaggagatgaagatcaccgacattccctcgttggcgagcttgaccacggcctcctggatttcggacttggcgccgacgtcgatgccgcgtgtcggctcgtcgaggatcaacagccggggctcggtggcgagccagcgggccaacaacaccttctgctgattgccgcccgacaggttcttgatgagcttctcggggtcagggggacgcacattgagcgcctcgatgtacttcttggcgatcgcgtcctgctcacggcgcgggatcggtcggatccatccacgacgcgcctgcagggcgaggatgatgttctcgcgcacggtgaggtcggcgatgatgccctcatcgcgacggttctcggtggaataggcgatccggtccttcagggcggtggccggtgagccgatcgacacgtccttgccgtcaatggcgatctggccgctctcgggcttgtcggcgccgtagagcagccgggccagctcggtgcgtcccgagcctagcaggccggcgaagccgatgatctcgccggcgaacaggtccaggtcgaccgcctcgatggagcccttgcggccaaggccgagcaccttgatgaacggcgtgcgtgcctcggtgcccgcgacctcgtcggcctcgcgggcgatggtgctcagcgagcaatagtccttgccgatcatcttggagatcagggtggtgcggtcgagctcacgggtgcggtagctgccgatgaactggccgttgcgcaggatggtcatgcggtcgctgatctcgtagacctgatcgaggaagtgcgacacgaaaaggatcgccacgccctggtcacgcagcctgcgcatcactgagaacagcgtctccacctcgtgggcgtcaaggctcgaggtgggctcatcaaggatgagcaccttcgcatcgatgaccatggcgcggctgaccgccaccagctgttgcatggcgatggacaggtcggacagcggcgcccggggatccaggtggtcgagtccgaacctcgccagggcctgcttggccagctggtaggtcttcttccagttgatgccgagcggaccatgggcctcgtgcccgagcatcaggttctcgccgatggtcaggttcgtgcagaggttgacttcctggtagacggtggcgacaccagcgcgctgggcgtcggccgtcccgttgagagtgcgcttgcgcccggcaatggtgatcgacccggagtcgatcgagtagacgccggtgagcgccttgatgagtgtggacttgccggcgccattctcgcccatgagcgcatgtacttcgccctggtagagagtgaggtcgacatcttggagcgctttgacgccggggaactcgatcgagatccctctcatttcgacgattcgcgccgtgggttccgtcatgttcagaccctcgatatgtgctggatgaagcggctgacatcgagcgggtgggaccctggacccagtgccagggccccacatccgccgatgtgttggaggaggactcccggccgtggggccgggtgcgatctgctcgatcagtaggcgcggttcggcagggccgccttggcggcctccggcgaatcgaaggtcaccgaatcgacggtgtagagcgcatcgacgtgctctccggcctttgccttcttcaccgcattcagcgcaatgtcaccaaacagcgggttgtactcggccacgaagctcagctgtccggcggacagggattccagggccgccttggtgccgtcgatcgtgatgatcttgacgtccttgcccggcgtgagcccggcctcggtgactgcctgggtggcgcccaggcccatctcgtcgttctgggcgaagatcagctggatgcccgggttggccttcaggagcgtctcggtcaccgacttgccgtcattctgggaccagttcgcggactggctggcaatcttctggaactcgggatgggtggacatcaccgaatcccagcccttgttgcggtcgttcaccacggacaggccggcaggcccctccagcacgacgtacttggcgccctcggggaactgcttgacggcccagttggccgcgctctcggagatggcgacgttgtcaggggcgatgcgcgaggcatacagcgaggtgttgtcgggctcaatgccacggtccaacaggaagaccgggatctcggcctccttcgcacggttcagcacgttctcccagccggtggcctcggtggccgacagcaggatcgcgtcgacaccctcatcgatgaacgaggtcatggcggtgatctgggacgcctggtcgccgttgtccgacggggcgtacttcaggttgatgccattgtccttgctgaaggtgttctggatgttcgtcttgttcgccgtgcgccagccgccctcgggaccaactgccacaaagccgacggtgagagtcttcgagctgctgcccgaatcactaccgctaccgccgccactgcatcccgtcagggccagggcaaaggggctcttcacgaacgagggtgtagcgcgggtctgaatccgccggcttcgagcagcgaccgagcgatgtagtggctgaggttgcggaagccgagggccgtgccgcggaggtgttcgagtcggccgttgatcgctccggtggggccgttgctggtgccggggcggtcgaagtagccgagcacgtccgaagcgcgctgtgtgagggtgcgggcgagtttgcggatctcgacgagctgctccgggacgctggcgctgatcttgtcgatcgtgtgcgcgaggaagaatctgcccaggccgcggtccttgtcccggtaggcggtgatcatgtcttggtagatgccccacgtcgcttcgacctcgacgtgcctgtcctcggcgaacagggcatctagccgcgcctgctgcttgtcggtgagcagaccggcaccggtcagcagggtccgtctggcctggtagagcggatcgcccttcatgccccgccggccgaagacgtcgtgctgtacccggcgtcggcagttctccagcgcgtcaccggcgagccggatcacgtggaacggatccatgaccggggccgcgtcgggcagttcttcggcggcggcggtcttgaacccggtgaatccgtcggtcgcgacgacctcgatcccctctcgccagggcttcggtctggcggcgagccaggtcttgaacacggctttcgagcgtccggcgaccatgtccagcagccgtgccgggccggtcttgtcgcgcaccggggtcaggtcgatgatcacggtcacgtacgtgtcgccgtggcgggtgtgtcgccacacgtgctcgtcgacgccgatcgtggtcacgccctcgaaccgcgccgggtcatcgatcagccgccggcggccctcggcgaggatcgcgtcgttcgcggcggaccaggacacccccagccctgccgcgacacgcgtgaccgagagatgatcgaggaccaagcccgccagcccccacgccaacccaccgcgggagatcttcgcccgtaccggcgcggcggccgtggtgtcctgccgccagacccgcccacacccgcagcatttgtagcgccggacccggatcagcagggtcgtgggccgatgcccgaacggctcatgcgcgagccgacggatcaccgtgtcgcgcggggcgccctcgcatccacactcgcggcaccaccggtccggctccacgacacggcactcgatcaccgcccgatccgggtccagacgctgcccgacagcctccaggccgagctcgtcgagaccgcagaacgtggtcaggcaaggtgtagtgaaagtagggtgtgacacgtcgaggtcttccggcagatggcgagtgtgagaacttccatcctcagggagacctcgacccctacccggccaccgacacgctcaacccgctacaccctcgttcgtgaagagccggcaaaggcgcccagggccgcgatgagcttcagtaacttcctcataatcgaacctccttgttcgagctgcgcagggccgtcacatcgaccagctgcatcttggtggggggaatccagagcgtctatgcccgggtgtccatttcgtctgttatcggtcacacgcgaataaatgaaaccgccgtgtcgtacgagaacgccgtaatcgacaacgaccgtcgccgggctggttccggagcccgacgaagattgtggggccacgacgcgcggtcgtggaatcgtgggacgacatcaacgtgaccgttgcgtcgccggacgtgggccggccgatgaccggaccaccagggagggctgggtgcgcagggtctcacgctcgacccgggcccccttgatgcgtgccaacagcgatccgatcgccatctcgccgagcttctcgaagttctggcgcacggtggtcaggggcgggatcatgtgggccgactcgggggtgttgtcgaagccgacgacactcacgtcgtcgggcacgcgcaggcccacctcgctgagatagtgcaccagacccagggccatctggtcgttggccgagaacacggcggtggcgccggtgccctcgatgagtccgggaccggcggcgaatcccgaatccgggctccagtcgccctcgacgatcgcggccggcgtcaggccgtgcgcggccagcgtcgcctcgaaggtggcccggcgcgagcgggcgtcgccccagtcatggggtccgctcaggtgcgcgatgcgggtgtggcccagttccaacaggtagtcgaccatcatgcgggtgcccagctcctggtcgacgctggcctgcaacccgttgtcatccaccaggtgggcggtgtcggtggcgatcacgacgctgggaatctgcaacccacggcgccggatcacctcgagcaggggaagtcgcggggcgatgaggcacagcccctcgacattctggtcgagcaggaactccaggctctggttgatggcgtccaccgaatcgtcgttcaccgacaccgagctgaggaaatagcccgcacgtcggctggccacctccacgccgcgcagggtgttcatcggcccgaagtgctcggggctgtcgacgatcgcgccgatgcgcccggtgcgcatccgcgccagtgagcgggcggcgctgttggggcgatagcccagcgtcttgatggccgcctccacccgggcccgcgtctgcggctggatgctggggtggtcgttgatcacccgcgacacggtctggtgcgacacgcccgccaattcggccacgtcgcgaatattcggcgccgttcctgcagccatctcagaccccctggaaatcccgcgactcacacgccacgatgaagacggtaatacccggagttccaattcagcgcatcctggaacgcctgcggcgaggtgtgctcatcaatgaccgccagctcggtgccggccatcctggcgaaatcggcgaagacctccaccggcacctgcgatgacatcaccgtgtggtgggccgcacccgaggccagccacgacttcgccgaggtcaccaagttggggcggggcttccagaaggcccgccccaccggcagcttgggcagcgagtgctcgggttccacgatgtccaccacattggccgtcagccggaagcggtcgcgcatgtccgacagggccaccaccacggcggggccgggatcggcggtgaacaccgcacgcaccggatcggacttgccaccgatgtccaggggatggatctccaggcgcgcacggcgcgaagtcagcgaggggcagacttcgagcatgtgcgcgcccaggatcgtctcatccccgggcgtgaggtcataggtgtagtcctccatgagggaggccccgccgggcagcccggcgcccatcaccttggccacacgcaccaggatcgcggtcttccagtcgccctcggccccgaagccgtagccatccaggttgaggcgctgtaccgcgatccccggcagctggggcagcgagccgaggtcttcaaaggtgtcggtgaacgcatggaagtcgccggcctcgagcacggcccgaaggcccacctcgatccgtgccgcatcgcgcaacgcgccacgacgggcaccgtcggcccgcagttcgggcaccacctcgaactgctcgtcgtattcggccatggtgcgcgccacctcggcgtcactggcgcgctcgatggcgtcggccagttcgttgaccgcccaggtgttcaccgcaacgccgaagaccgcttcggcctcggtcttgtcgccctcggtgacggccacgtagcgcatgttgtcgccgaagcgggccaccttgaggccattgacctcgttccagccggctgcggcgcgcgtccaccagccgatctcgcgggtcacccggggatcggagacgtgtccgatcaccgacttccgggcaatgcccagccgggtgaggatgtagccgaactcacggtccccgtgggccgactggttcaggttcatgaagtcgaagtcgaggtcggcgtagggaagcgcgacacctgcctgggtgtgccagtgcagcagcggcttctgcagggcctccaggccacggatccacatcttcgccggtgagaaggtgtgcatccacgtgatgacgccgatcacgctcgggtcggcgttcgccgccaacaccgcctggtggatgccgtcggtgtcggtgagcagctggtgcggctcgatggtgacggggatgtcgctggaggcacgcagttgggcgaggatcgcctcggactgctcgtcgacctgacgcagcgtctcctcgccgtagagggcctggctgcccaccaggaacaggaccttgagctggctcaggtcgggaatgatgttgtgtgacatgggtctctttcgcggatgtcgttcggggggtctgggtcgatcgggggtctgggccgatcggggacgtggctactgctggggctggccgtagacgttctggtagcggtcgaacagcttgtcgacggcctcaccgggcagcgcgatgggcttctcccccgacgcgggcatagtgcgccgtgcgggcgacgtcctccaccatgacggcggccttgaccgcctcgcgggcgtgcttgccgatggtgaagacgccgtggttggccatgagcaccgcccgcgagcgatgtccctgcagcgtgtcgacgatgccgcgtccgatctgctcgtcgccgatcaacgccagcggacccaccgggatctcgccaccgaactcatcggcctgtgccgtgagcacgcagggaatggcctcgccacgcgccgcccacgacgtggcgaagtcagaatgggtgtgcaccaccccgtggacgtcgggcatgtggcggtagacgtaggcgtgtgaggcggtgtcgctggacggattgcgctgcgagccggagaagccggccaccttccgaccgtcgagggtgcacacgaccatggactcgggcgtgagctcgggatagtcgacaccggagggcttgatcacgaacaactcggtgcccggcacccgcccggagatgttgccgccggtccacaccacgaggtcgtagcgcacgagcagctggtgcagttgcgacacctcggcgcgggtgcgttcgatggccgtgatctgttcgggggtgaacagcaattcgctcatgacagggttccttccatgaccccggtggtggccaccggggcgtcgtcactgatccgggattggtcgccggggcggcgtcgcgggcgacctcgtcggcgagggtctcgcgacgcagcgccttgaggcggtgcatcacgtcattgccgcctcggccgaagtagtcgtgcagggtgacatagtcggcatagagccggtcgtagatcgccgaggcggccgggtcgggcacgtacacgtgctcgcgcagctggcccatgtggtcggacgcctgctgcacgtcctggtaggcctccgccgcgacggccgcgtggatggccgagccgagtgcgggcccctgctcggaatcgatgatggagatcggcatgtgcaacacatcgctgtagagctgcatgagcacccggttcttgatcagcccgccggccgcgatgaactcgcggaccggcacccccgattcgttgaaggtctcgatgatcttgcgcgtaccgaaggccgttgactccagcagggcccggtagacgtcctcgggtggggtctgcagggtgagtccgatgatcaggcccgacagctcatggtcgaccagcaccgaacggttgccgctctgccagtccagggccagcaggccatggctgccggtcggcttcatggcccccagcgccgtgaggtattcgtgcagggagaccccggcctcatcggcggcgtcccgggcctcggcgcccccgagttcccgggtgaaccacgcgaagatgtcgcccactccggattgtccggcctcatagccgaaggatcccttggtgatgcccccgtcgaccacgccgcacatcccgggtacctcgcgcagctcgtcatggttcatcacatggcaggtcgaggtgcccatgatcgccaccatgcggcccggggcgatggcccgggcggcgggagcggtgacgtgggcatcgacattgcccacggccacggcgatgccctgcggcagtccggtccatgcgacggcccgggcggtcaggtgcccggcgacatcgcccagctgtccgatcggatggtcgagcttgtcgtcgacgaagtcctcgaaggccgggttgagggccgccaggaactcgcgcgacgggtagtggccttcctgcaggatgcccttgtatccggcggtgcaggcattgcgctcataggtgccgcccaattgccacacgatccagtcggcggcctccacccagcgttcggtggcggcgtagacctccgggtcctcctcgagcagttgcaggcccttggcgaattcccattcgctggagatcaggccgccgtagcggttgatccagggctcacgacgcgcatgggcgagctcgttgatgcggtccgcctggggctgggcggcgtggtgcttccacagcttcacataggcgtggggacgctcacggaactgcggcaggtcgtgcagcggcacgcccccggcggtggtgggcaccatcgtgcaggcggtgaagtcggtgccgatgcccacgatccgcgcgggatcgacgccggaggcggccacggcggccggaacggcgtgcttgagcacctcgatgtagtcattggcgtcctgcagggcccagtcggggggcagctggtggccggtggcgtcaagcacctcgtccatcaccgcgtggggggttccctttcacatcatgttaccggtcacatggcctgaatgtgaaatcccttccgcatcagttcaggtggcccggttcccgggagtccgccccgcccgcccggcaccggatcgacgagcctaggattcttggcatgatctaccacgatgtcaccgaggtagtgggacgcactccgcttgtgcggctcaaccatgtgaacgacacggacgccgtcgtgctggccaaacttgagttctacaacccggcgaactccgtcaaggaccgcatcggggtggccatcgtggacgccgcggagaaatcgggcgcgctgggggccggcggcaccatcgtcgaggccaccagcgggaacaccgggatcgcgctcgcgatggtgggcgccgcccgcggctaccacgtggtgatcaccatgccggcgtcgatgagcagggaacgccgcgccgtgttgcgcgccctgggcgccgagctcgtgctcacccccgccgtggaggggatgcggggtgcggtcacggccgccgagcgcatcgccgccgagcgtggtggcgtgctggccagccagttcgccaacgccgcgaaccccgcggcacaccacgcgaccaccggcccggagatctggaatgacaccgacggcgaggtggcggcactggtgtccggcgtcggaaccggtggcaccgtcagtggtgcgggacgctatctgaaggagcaggatccgcgcgtcgacgtgtacgccgtggagcccgacgagtcgcccctgctgtcgcgcggcagggccgcggcccatggcatccagggcatcggcgccaacttcgtgcccgacacctatgacgccgctgtggtcgatgaggtgctgtcggtgaccaccgaccaagccctcgcgatggcgaggcgtctggccgccgaggacggcatcctggcaggcatctcatcgggcgccgcggtagcggcagcactcgaagtcggggcacgtccgcagtatcgcggccggacgatcgtggcaatcatccctgatttcggtgaacgctatttgtccacgcccctgtttgccggtttgatggactcgtgagtatctcgattcgcaacatcctcgaccgtctcaacgaggacctgtttgccgcccagcgcgaagaccccgccgcgcgctcgaagttcgagatcgtgctggtctactccggcctccacgcgatctggatgtaccgcatcgcccatgtcatgtgggagacgagcggagccctgaagttcccggcacgcctgctcagccagttcgcgcgcttcatgaccggcatcgagatccatccgggggccaccattggtaggcgcttcttcatcgaccatggcatgggcgtggtgatcggcgagaccgccatcgtgggcgatgacgtgttgatgtaccaccaggtgaccctgggcggacgttcccgtggccatttcaagcgccaccccacgatcggcgatcgcgtcctgttgggcgccgggtcgaagatcatcggtgacatcaccatcggcgatgatgccaagatcggcgccaacgccctggtggtgaaggacgtcgcccccggcgcggtggtgatcggcgtgcccagcgaggtgcgtccgggcgacgtcatcgcctgatccacgcctgctgctgcgtggcagcccgcaggacctagctgcaggtgccggtccccacgacggggcccagtgagcgttcgacgccctgcacgatcgccgaggcgtagttcgcccggtcggccggtgacaacccgttcgcgctggtccgcggcgcctcgttgtacacccagggcacctgttgggcggtgagcatgatgatcgggatgtcgccccacgatcccagcccacgcccggccgggaagtcatggcccggcgtcatcgcgatggcgcccgccccgagctcctgacgggccgtcaggaactgttgggcatattgcctgctcagggccgcgctgcgttcatcggtgaaccgggcggtcaacccgtcggaggtgttggtgcggaatcccccgagctggtcgtagtagatctggccggcacccaccgtgtcgggcaggtcggtgtggatcgacacgccgatgtctgccggcgctccccccatcgcggtctcggcacgtagtcccttctgccacagtgtctggcgcgccgggtcgggatcaccgtcgcgtgacagcacgacgacgtaaccggcgcgctccagttgcgccttcgcgtcgagggccaccgcgaagacgtccgcgggctcgttgccctgcgaggtgttctcaccggagtagatgccctggctgccgcccgatgtggcccgtgtcgccggcaggtcggcaccgtggccggggtcgaggaagaccactgtcgcgcgtcccgcctgcgtgcaggggcgactggctgacgacgagggtgccgccaccgggaccgggcgggtcgatccccccggcaccaggaaggcgatcgcgccagccaccgcggccagcacggcgatggccaccgccaccatgatcggacgcgagcggcgggcgggtgcggcacgccgcgcacggtgcggtggcgggccgtcgacgggatcagaacttattcgggtcaacctgacgcgcctgtgaataggtgcccacgatggaggaattccacacgcgggcgaaatcattcttcctggccgtggcgtcggcattgctcgggaaatccgggtaggtgccctgacagccgccctgcgcccaggacaggtattgctggtcagcgctctgcgacgacgccagggccgtgatcaggtcggtgaccagttgctggccattcgggatgcgggtggcctcgacgctgcgcagcgcatcgatctcgcgggcccggttgtcggtgatcgtgccgagcgcggccacgtcacaggagttgatggccccggccagtccggtgcggtcggcggtagcctggtcgagcaccccctggatcgactgcacgacggttccaccatcgggggtgacgctggggctggcgctgctggccgagcgggacggcgaggccgatgccgacgatcccgcgctcggcgacgctgcgcccgcgctcggcgagggcgtcgcggcgggggcattgagcaggccgtggatcccggtgccgggaatcccgaagcagatgccggccgcgatgagcgcgaccaccaccacgtacaccacgatcacccagggacgccggtacagcggtgtgcgcccgtcgccacccgacggggcggcgaccgggggaaccggttggccgggccactgcgtgaccggtgccaccgccgggatgacctgcgtgggctgcccgccggtggacggcgccacgggcgtgggcggaaccgcagtcggccgtaccggttggacgggccggttgggttgggcggaggggttgggttgggcggaggggttgggttgggcggaggggttgggttggacaggctgggtgggttggaagccctgcgccgaccatgcggtccccggcgcggccgtcgggatgatctgggtgggctcatcacccactgggagctgcccgggagtggcgggttcggcgggcgcgggaggccccaccgggaatccggcggcgcgggcggcagcgaactcctgcgtggagggaaggcgtccctgactggcccggaagacggcgagccagcgggcatcaggggtctgggatggggccggcgcctgcggttgaccgggtgcctggggctgcgcgggggcctgcaccgggaacccggcctgctgggcggtcaggaactcctcgggcgaggggtccctgccctgggtcgcccggaactggcgcagccattcgtccctcatcgatctgccttcctagtcaccgaagtgtcccggcgtccacttctgcatggtctgatcgggggccccatggcccaattgcacagcaaagcagttgtcggagtcgaagccctttgcatagcaccagcggttggcgtcggcggcgttcgtgaatgagatgccggccaccatggtgacccagtcgtggcccgacaagcccagggtgctccagtcggctgagcgcagcatcatggccgtggagtacttctgcttgaaatcacggaattggttggcaatgtcctggttgctccaggtcttgccctgccaggagacgccgtcccacttggccgacaattggggcgtccactgccccaccaggtaggccccggccaagggggtgtcctgcttgatctcggcgtccatcgtggtgcgcgcatccgtgtcgctggaggcctgctgtggcccgtaggcgttggtgaccccggtgcccggaaggtagctggactgcgtgggataggtcgtggtggtggcgtgggcaatactgctcaccgtgaccacctgggcgccctggcagatcgagtaggcgtccatcgtggcgccacagaacttgcccgacatgttcaacacgccgccgccggcgtcgctcgtggagccgttgctgtagacgaagctggtgccattgctctggtcggcgccgcaggtgaacagccactggttgccccacacggacatcgagaaggggtacgaaccactggggcacgcggtgacatggccactgggcaccgcggtgaatccggagctcgagccgttgtcccatgcctggctggtgacattcaccgtcgaaacgcccgaggcggtcagctgagtcagggaacctgcgaaggcgacgatcgccgaggcaccgccatcaaagttcgcgacgtagccgccggtcggactcgtggtggccccatcggtggagtagctctgtgatccggcggtgacattcacatggaaggtggactttccggcggccttgcagaccagggagttcccgccgttccaggatgcccaggtggtcggcgtccaaccgcgggggcatgagggcaccgaggcgggcatcgaggcaacccgcaccgaggcgtcactgccggcggccgagcctgcggcacccgacgcggagccggaggcgccggcttcgggcttgttcaccaggccgtggattccggtgccggggatgccgaagcacaccgcggcggcgatgagcgccaacaccaccacataggcgacgatggcccaccaacgacggtagagcggcggcttgtcgccgctgccggacggcggggcggccaggggtgggatggcgggtgccgggggtatgggcggagcgggtgggaacgacgacgaggcgcccatcggggtgcccgccgtgggagccggggtggccccggtggtcgggatggccccattgaatgcggacccgaccgaacggggagtggtcggtgtcgggggtgttgactgcccggccccgcggggaaagcctgcggccttcgccgcggcgaactcctgggtggtcggcaggcggcccgactgctcgcggaagtcggcgagccattgggcgctgccgtcgagcgctgcggggtttgccccagggacgggatcggcgtccagggacccgaagccgccctcacgggcccggaggaactcctcggacgagggttggcgtccgtagaccgccgtgaactgcctcagccattcatcctgtgacatcgcaatgccttccccgctgggagatcagttgaaccaggccaacaggatgatgatccccaggagcatgaccatcaccgtgttgatcaccaccagccagccgtagcgatcgactttcgagccgggtgtgatcgcggagagccgatagaaatagactccctggatcatcaccgagacgagaaccgtgatgagcgacgcgcccaggagcacgagtgtcgcgaccacgaagaaggagcctgccgaggagaagtcactcagcaggtcttccaggtcagtgctggaaccatagaaactgctgacgcgggagttgagcagcatgtcattgagcatgaacaggatcgtgatcggcatcagtggaatgaccgactgggtgccaagcttgagcatgtcggtgaaggtgcatcgcacattgagcacaacacgcgtcaacgccgcagccaccacagtgagcagcaacgccgctccgccaaacaggatgagcgccttgaagaagttcccgacgctggtgaattggtaggtcagggtgatcacgacggcggccaggatgatgccatatgtgacccaggcatagccgtccttgatggtcgcatcgatggacgtcgggtgcagccatgcctgcttcaggtgtgcccagtagcccttgctgtgcgccacgaaggcgctgtcagccgcgggctggacgggggcggtcatcatcagtggctgaccagccatctggggctgctgcccgaagaactgttgctggctggcgaattgctgggcgcccacgggttgttgttgaccgaaggcttgctgttgcccgggggcggccgatggctggcccatcagcggcagctggggcatagtcgcctgctgcggcggcactggcgaggcttgtccacccccctggggaccggattccgtgaaggtcggggctgcctgcagcggtcgagcggcaccatcggccacggcgcgctggaactcggcctcagtgggcgcacggccgttgagcagctggaagtagtccctccagtcctgggcactcacggccggggaggttgccgggccggacgccttgtcccccaccggcgtcgtggagtcaggggaagcggcgacggaaatggtcggctcggcatccggcgagtccgtcgtggacgatggggcaccggaggactgtgtgtcagacgtcggggtcggcgatgatgcccctgccgctgccgtgtcgttcccggctctgggcaggttggccccgcccagatcggctccgcgcagatcgaccccgcagacggggcacgtcacatcgtcgtcactgaccggcgacccacaattgggacacaccaacacacgcccgttcgcctcactcatcaatccagccttccctgcgcacgctcttgattcggggtacagcgacgaaggacctggttcgcacacaggcaaggctgtgaatgacagcacgaatctagctttcgcctgtgcggagactatcaggggaaatagggggaaagcagcgttatccgagggttatcgcacggttggtggatctgctcggcgctggctgcgcaagggcatgccgccccgtcgcgcacccctccccacggggtggggcgtggcccggaaccgaatcgcgaagccgcgcaggcctgacgaaccagcaggaccaaccgggactcagcgttggcccgagatctccgtgtgatggcgcacgacctcggagacgatgaacgccaacagcttctgggcgaactccggatcgagatgggattcctccgcgagggcgcgcagacgatcgatctgcacctgctcgcgggtcggatccgacggcgggagtccgagctcggccttcaactcccccacctgttgggtgatcttgaagcgctcggccatgatgtggatgacggcagcgtcaaggttgtcgatgctgtcgcgcatccgtgccagctcggctggcacgggcttcggctcaccggtcatgtcgtcaccgtccgtgtgctcacccatgggaaaaaggttaccgatccgcctcaccgggtcagcggatgaccagctcgatgcgttggaactccttgacgtcctgatagccggagctggccatcgagcgacgcaacgcccccacgaggttcatcgtgccgtcggtcaccgagctggggccgaccacgacctcctccaggctgcccaccgaatcgtagtgcacgcgacgtccgcgcggcagcgtctggtgccaggcctccgcgccccagtgccagcccttgccgggagcctccttggcgcgggcgagcgggccaccgatcatggcggcatcggcgccacaagccagggccctggcgatatggccggaggtgcccatggcgccgtcagcgatcacgtgcacgtagcgaccaccggactcgtcaaggtagtcgcggcgcgcctcggcgacatccgcgatggccgatgccatcggcacctcgatgcccaacacctggcgggtggtggacgatgccgcgcccccaaagccgacgagcacgccggctgcaccggtgcgcatcaggtgcagggcggtctggtagctggcacaaccgccgacgatcacgggcacgtcgaggttgtagatgaacttcttgaggttgaggggctcccccgagctggcgacatgctcggccgacacggccgtgccacggatcacgaagaagtcgacgttggcctgctcgaccaccgagatgtattcctgcgtgcgctggggcgacagggatccggccaccggcaccccggcctcgcgcacctgcgccagccgctcggcgatcagttcgggcttgatcggctcggagtacatctcctgcatgcgacgcgtggcgcgcacctggtcggagatcgtggcaagttcctcatacagcggggtcggatcgtcgtagcgcgtccacaggccctccaggttgagcacccccagaccaccgagcttgccgaacgcaatggcggtctccgggctcatcaccgagtccatgggcgcagccatcagagggaagtcgaattccaccgcatcgatcttccacgacaggttcaccagctcgggatcgcgggtgcgccgcgagggcacgatcgccacatcatccagcgagaaggccttggcagcacgcttgctgcgcccgatgtcgtacatgaagctctccgatcccgcgacgggcccgccccggcgcagctcctgagtctactggtgaagggctggggccggcagcagcgcccgaagcagcccggacgcatgagtgcccgggacaatgtcccgggcactcatggctattcagctcaatgggttactggtgcgtcgaatagttcggcgcctcaacggtcatctggatgtcatgcgggtggctctcgcgcaggccggcagaggtgatgcgcacgaacttgccgcgcgactgcagctcctcgatggtgcgggcccccgagtagaacatcgactggtgcaggccaccgatcagctggtacaccacctggctgagcggaccgcggtagggtacctgaccctcgacgccctcgggcacgatcttgtcgttgctggtgacatcggcctggaagtagcggtccttcgagtagctcatgtggcgtcctcgggtggccatcgcgcccagcgagcccatgccgcggtactgcttgaactgcttgccgttgatgaagacgagctctccgggactctcgtcgcaaccggccagcagggaaccgagcatcacggtgctggcacctgccacgatcgccttggcgatatcacccgagtactgcagcccgccgtcaccgatcaccggcacgccgaaggggcgacaggccctggccgaatcgtagatcgcggtcacctgcggcacgcccacaccggccacgatgcgggtggtgcagatggagcccggtcccacgcccaccttcacggcatcgacaccggcctcgcacaacgccttggcggcgtcataggttgccacattgccaccgatcacgtcgacgcccgcagcggccttctcggccttgagcttgcggatgaagtccatctcggccttcgaatggccgtgggcggtgtcgacgacgatcacgtcgaccccctcgtccaccagggccatcgcacgctcccaggcatcaccgaagacgcccacgccggcaccgacccgcaggcggccctgcgggtccttcgcggccagcgggtattgatcggacttcacgaaatccttcagggtgatgaggcccttcaggcggccctggtcgtcaaccagggggagcttctcgatcttgttggtggccaacagcttgagtgcgtcgtcgggcttgatgcccaccgggccggtgaccagcggcatcttggtcatgatctcgcgcaccgggcgcttcggatcggtctcgaagcgcatatcgcgattggtgatgatgccgagcagcttgtcgtcggcgtcgatcacgggcacgccgctgatgtggaaattgccacacagttcgtcggcctcggccagcgtggcttccgggccgatggtgatgggctcaaccaccatgccggcctcggagcgcttcacccgatcgaccatgtgcgcctggtcgtcgatcgacagattgcggtggatgatgcccagaccgccctcgcgcgccatcgcgatggccatgcggctctcggtgacggtgtccatcgcggccgacagcagcggcgtcttcagacggatgttgcgggtgatctgtgcgctggtgtcaacctcggagggaatcacatcggactcgctgggctgaagcaagacatcatcgaaggtaaggcccagtggagcgaaggtctccggaactcctgctgcgttcagtccatctgccattgaatgagccctttcgtttgacctgaggatggacgcattctagctgtacttccccgtgacgttgtgaacgcgggctgagggagtctggccgccgatcccggtgtggggtctgtggtgattgtagtgatggagccaggtctcgtaggctgcggcgcgctcggcttcgctggcgtagggcttcgcgtaggcccactcgacggcgagggtgcggttgaaccgctcgaccttgccgttggtctgcggccggtatggccgggtccacttgtgcttcacctcgtcgccgagcgcgtcagcgaaggcgcctgaccggtagcaggaaccgttgtcggtcatcaccgcggtgactgtgacgcccaggcctgcgaagaacgcgttcgcgcgggtccagaaccccgctgcggtctctttgcgctcgtcgtcaaggatctctgagtacgcgatccgggagtggtcgtccacggcgtggtgcagataccggtagccgcgagagccggctgccccggcacgggctgccttgtcgcgggccactcccgcgtgacggtcctgcatggatccgcgaccgtgggcacgccacccgccgccgtcggggatccggccttgtttcttgatatctacgtgcacgagctggcccggcgcggcgacctcgtaccgtgtcggcttcgggcggcgaaccggcagcccggtggcctggtcgatgttgatcagcttcggcatcttgtatcgggcgagcacccgaccgaccgtggaacggtgcaaccgcaggtgatacgcgatccggtgcggaccccaccggcgagtgaaccgcaacgcgacgatccgatgctccgtcttacgcgaaagccggttcggtgacgaggtgggcctcgaactacggtcgatcaacggcagccctgcccggtacctgtcggcccaccgcttcaccgtcgcgggcgagcactggaaccgttccgccgcccgccgcaacgaccagccctgttccacgacgagaacagcaagacgacgacgcccttccggtgtcaagggtgcgttagcgtgagtcacgaagacctccgtggtcaggagagtgagtgtggtaacccacatcctgcccggaggtcttcgctacctcacccgttcacaacctcccggggaagtacacctagctcgcccctgacaaggcatgaatggggctcccgcagggagccccattcatgccttgcgatcactgcgatcttgagggtctcaacgtcgcagtgacccgacgtgcctacttggcggcgtcgtcatcctcttccggcttgttcaccacgagcgtctcggtggtgagcagcaggctggcgatcgatgccgcattggccagcgcggagcgggtgaccttgaccgggtcgatgacgccctggtcgatgaggttcccgtactcgccggtcttggcgttgaatccctcgttggccttcatctcggccacgcgggacacaatcacataaccctgctcgccaccgttctcggcgatccaacgggccggctcgacgaccgcgcgctgcacgatctgcgcgccgaccttttcgtcgccggtcacatcgagatccgacagcgcatcggctgcgtgcaccagggcggcaccgccgcctgcgacgatgccctcctcgatggcggcacgcgtggcggacacggcgtcctcaatgcggtgcttcttctcgttgagctcgacctcggtggctgcaccaaccttgatcacgcagacgccaccggcgagcttcgcaacccgctcggacagcttctcgcggtcccaatcggagtcggtgcgctcgatctcggcatgcagctgcttgacgcggccctgcacatcggagtccttgccggcgccctcgacgatcgtggtgtcatccttggtgaccaccacgcgacgggcgcgcccgagatcctccaggctcacctcggccagcttgaggccgacggtctcggagatcacctgaccaccggtcaggatggcgatgtcctcgaggatcgccttgcgacgatcaccgaaggccggggccttgacggccacggcgttgaaggtgccacggatcttgttgaccaccagggtggacaatgcctcgccgtcgatgtcctcggcgatgatcaccagctggcccttggccgcgatgaccttctcgagcaccggcagcaggtcgttcatcgaggagatcttgccgtcgttgatgaggatgtaggggtcgtccatgacggcctccatgcgatcctgatcagtgacgaagtagggcgacacatagcccttgtcgaactgcatgccctcggtgaattcgagctcggtgcccagggtctgcgattcctcgacggtgatgacgccgtccttgcccaccttgtcgaaggcgtcggcgatgatcttgccgatgccctcgtcgcgggagctgatggtggccacattggccatgtcatcggtggtctgcacctcacgggcggcactgtgcaggaaatcgaccagggccttgacggccttgtcgatgccacgcttcagccccacggggttggtgcccgacgcgacggcgcgcaggccctcgtgcacgagcgcctgggccagcacggtcgcggtggtggtgccatcgccggccacgtcgttggtcttggtggcgacttccttggccagctgagcacccaggttctcgaagggatcggtgagctcaacctccttggccacggtcacaccatcgttggtgatggtgggagcgccccagctcttgtcaagcacgacgtagcggcccttggggccaagcgtcaccttgacggtattggcgaggacgtccacgccacgctcgagggcgcgccgtgcctcctcgtcgaatgcaagttccttagccatataactaatcccgtcccggcgttacttgacgacgaccgcgaggatgtcgcgggcgttgagcagcaggtagtcggtgttgttgtacttgacctcggtgccgccgtacttggagaagacgacgacgtcgccctccttgacgtccatcggcacgcggacgcccttgtcgtcaacgcggccgggccccacagcgaggaccttgccctcctgcggcttctccttggcggtctcgggaatcaccaagccggaagcggtggtggtttcggcttccagcggctctacgaggacacggtcctcgagcggcttgatcgtggttgccacgtcaaacccctttcttcactagtccagcgccggggttgccggcgcacacgtttgtcttgttctgaccagtgggacgtcgtcgcggtgccatcccctgggttggcactccccagcggagagcgccaactaacaagttataccccgcctagcactcgatcaagccgagtgccagagacagttgagcgcgggaggctcagccctgctgaagctcccgcgctcaactgtcaccgtcgtgatcaggatttcggcttggtgatgaatccctgggcgatgagccagtcataggccacatcggccggcccgcgaccctgcacgtccacctcggcgttcatcgccagcagcgcatcgttggtgagggccttggagaccgggtcgaacagctcgcggtactgatcggccgccttattgtaggtcttctggcgcatcacgggcgacacattgtaattggggaagaagtgccggtcgtcctccaacaccgtgaggtcgagcgccttgatgcgcccatcggtggtgaacacctcgccgaaattgcacagcccgtcggcggtggccgaatagatggcaccggtgtcgagcaccttgcgctgcacctcgcccagcgacagatcgtacttggcggccatcggctcgaagccgtcattgcggctgttgagctcactctcaacgcagaagctcagctcggacgacggcagcgccgcaaggtcggacaatttgctcacgcccaaccggtccttggtcttctgggtgatcgcgaagccgtaggtgttgttcatcggcgccggagggagccagaccatgtggttcttcgccaggtcctcgtcgcgcaccgccacatactgctgttcgggatcggtgatcggatcggaatggcccagatagctgatccacccggtgccggtgtactcccactggaagtcgatctggccgctgagcagggcctggcgtgccgacgacgagcccgggatattggtcaggtcgttcacatcggcaccggccgacttcagcaggatcaccgcgatcttgccgagcaccagctgttcggtgaagttcttcgaacccaccgcgacgctctggtcgcgcaggctgatgtcagccagcgaaccggccagcttgcccttcgccgacagcccgccgccggtgcccagggcacacgacgagaagatcagggaacaggccattaccagggggatcagcagccgtcggggcgagggacgcaaccttcgcatcggggccgacaccgcctgcgatccatgtacgtgcatgctcatcgctcacagtcccttcggttgcgttaccagttcaagaacttggcctgcccactccaccagcagcgccagaagagccaccaacacggcccccgacaccaggatgcgaaatcgaaacaaggtgatgcccgtctggatcagcgcgcccaggccgccggcattgatgaaggtgccgaacgcggcggtgcccaccagcagcacgagtgcggtacgcacgcccgacatgatcactgggatggcaagcggcagttcaacacgccacagcacaccgaaatccgagatccccatgccacggccggcctccaccagcgtcgggtcgacgccctgcaggccggtaatggtgttttgcagcaccggcaggaaggcatagatactcagggcgacaacagcggtgggcacaccaaagcccatggccatggccagcagcacgatgagaccgatcacgggggcggcctgcccggcattcgcaaccgccaccacggccggcgcggcgcgtcggaaacgtggacgagtcaacagcacaccaatcgggatggccgtgaccagtaccaccacggtgcagatcgcggtgagcacaatgtgctgcacgaaaagctcgccgattgtgccccaggccagctggcgggcctcgatgtcgtcaagggtggcggtggcgcgccagatgagccatacgatgaagccgacaagtaccaggatcggaatcccgatgacctgacggctggcgccctcaggcttcaacttcacttggaggcctcctcgggctcaccgtggccggcctgcgcagcagcaaccttctcggcggcctctgcacgggcgtcggcctcctcggcaaccctttccttctcggcacgggtcttcgcagcgcgagcgttgatatcgcgcacatgttgggtgatctggtcgaaggtggcgatgccgagcaggtggccggcgtcgtcaatcaccaccgccccctcgtgcattgaggtgaccagggtatcgagcactgtgtcgagggtgacatcacgggtcagcagaatcggctgacgtcccggacgagcatgcacgacctttccgcgcaggttcgtcgtccacaaccaatcaacgggacgatcattgtcatcaagcaccaccacttgatcacgcttctgatgtcgggcctcccgaagggcggcatacaccgggtcaccggcgtgcacggtggccgcctgctcgagctggatcgacgccaaggtctgcaatgacagctgcttgagcgcagaatcacggcccacaaaatccgcgacgaactcatcggccgggttggccaggatgcgctcggcggtgtcgtactgggcgatgtgaccatggtccttcatcaccaggatgcggtcgccgagcttgatggcctcgtcaatatcgtgcgtaacgatcaccatggtcttgcgcagagtggcctggacagcgagcaactcgtcctgcagacgcgcccgggtgatcgggtcgacagctccgaagggctcatccatcagcagcactggcgggtcggcggcgagcccgcgcgccacgccgacccgctgctgctggccacccgacagttccttgggatagcgctcacggtattcagccggatcgaggccgaccagcttcagcagctcgtcgatgcgcttgttgatgcgccccttcttccagttgagcagccggggcaccacagcaatgttgtcggccacggtcatgtgcgggaagagacttcccccctgaatgacataaccgatctgggtgcgcagcttgtcggggttcaggtcacgggtatcgcgaccgccgatggtgatggcaccgctggtcggctcgatcagacggttgatcatcttgaggctggtggtcttacccgagccggacaggcccacgaaggtgacgatctcgccggcgggaatcgtcaggctgaggtggtcgacggccggaatgtcctggcccgggtaggacttcacgacatcgttgaagacgatctcgacgccggaggtctccgaggaccccgccgcagtggatgctgacccgcgcgcatcggtggactgccgggcagtggtcgaattatcaggcgtggcaggttcgctgctcatgcgcggattcctttcgagatggacagacggccgataagcaccagcacagcatctgccaccagagcgatgatgacgatgccgatggtgccgaccagggcgtagttcaaggcgttctttccgccgatctgcgccaggccggtgaagatgtaggagcccaagccggggcccagggcgtaggcggctaccgcggcgatgcccatggacatctgggtggagacgcgcaggcctgtgaggatgatgggccaggccagcggtagtcgcacccgccagaagatggtccagggtttcatccccatccccacggcagattcgataagtgtcctgtccacgcccagcaggcctaccgtggcatttcgcagaattggcaacaccgcgtagaaggccaccaggatcatggaggtcacggcgccgatcccggccaacggaatgaggatcccgagcagcgcgaaggatggaatggtgaggccgatcgtcgagatcgtattcgcaatcggctctagtttggggatgctcgtgacgagcaccgcgagggcaatggcgatgacggtggcaatgaacaccgactgaatcaccagggacgcatgttgatagctccggaagacgatatccgtccaccgcgaggcaatgaaatcacccattggcaagcatctcggttccgatctcctgtcgatttttggacggcgcattcggtgagcagtccgccggtccacacgcacccgccacacggccaaatcaagggggccgggccgttcagaccagcagccctggcggcaggcatacctcggcaaggatagagggccgacctttgtatgcaacccgaacccccgattcagagcccgattccgggtgtcaactcagggtgttgcgcggcgtgtcacgcagcctttgcaccaccagcgcggacagcccattcgtggtgggggtgagcagcagagttgcgacattcggaccttttggacgcaacttcttgcgcagcgcggcggggtcgatttcgacggcccgcttcttgatctcgagtgtgccaattcgatgggctttcacccatgcccgcagtgccggcatgtggtggtcgatcacctcgagcacctcgaaggtggtggccagcggggtgacgatgggctcatcgctggacaggtagccgacgccgggtgccaggcgccagacgtgcgccggtgcaccgcccggttggcgggtgcccgaagacccggttaccggcggttggatcgcgagcgcccgggaggcgccggcccggctcaccgccgggtcgggctcgtagagatagcgtccgggcgcgcggacctcgaagtcaggggccccggggtcggcccacgcctgcacgccggagggcaacaacaccgccgagcgtgaagccggcaccgcgatgcgcccggtaccgccgggggcgtcggggtccggggcgtcgggtgcgccatcccccggcaggtgccacagcccgcattccaccaggtcgccgtggtcgctgacccagatggcggcgacatcatcgggcaacagctcgcgagggaatcccggaccgagtttcacgcagctggcgtggtcggcctgcagctgcgcctcgacgaacggccatcccgggctgaggtcttcgacccgccagctgcgtccccgtgcggtgcgccgggccgggtcaaggtagacgcagacccttccggtggcgccccggatgaggccgggcgccaactccacaccatcaccggcgatcaccacggcccgtgggccgggacgcctggggccaccggcggccgcggggccgggtggatcgtcggcgccggcatccgcagtcgacaggttgtgccgggccagcagggcggtggcggggtctatctccaccccggtcactgacagcccggcgtcgaggaaggccagggcatcggcaccggctccgcagccgatgtcgagcacggtggtgatgccggcggacaccaagcggcgggcacgccaagccgacaccgatgccctggtggcctgctccacgccatcgctggtccacaacagcaggtcggcgcggggtcccagcttggcccgggcccgtcgccgcagccccatctggctgagcgcggcggccgccagctcgggcgcgaactcgcggcgcatccgctcaccggcccccaacgaatccggatcgggcagcccggtggcgagggtgagcgcgcgctcgccctccggggaggtcagcagctgggcagtgtgcaagtccacaccgtgagcctagggccggccggctcaggcagagaccgtgacctccaccggcgtggagaccagctcgggggtgcggtcgggcccggaggtcgcttcgctccactccagggtgcgcacatcacgggagaacagggccacgccggcgatgaggaacatcaacacgccacaaccgaaggtggccggggcggccccgacatgggccgccaggggtccggcgatcagcagtccgaccgggccgagcatgaacgatcccatcgcgtcgaaggagctcacccgcgacagcgcctcgggcggcacctcgcgctgcatcgtcgtggtccacatcacgtcgaacaccatgaaggccaggcccatcggcgcggacgccacgatgattgcccacagcggtgccgacaggccgagcatcgtgaagggtgccggcatggcgatcatggtgatgatcaggggcttgagcagcggatggcgcggacgccaacgcatcgccacgaacaccgcgatcacctcaccgaccgactcggcggcgagcacccacgaccacggttcggccccaccaagtcgttccttggcgatcaccgggcccagcacggcatgggccgcgttgaagcacatgttcagcagcgaccaggcggccacgaccacccacagccactcccggctgacgaactcgcgccacccctccttcatgtcgctgaccagccccggcaccacgtcacgggcaccggtgttgtagcgcgggtgcaggcgcaccgcggtggcggcggtcaacgcgtacatcagtgcgctgacgcccaggccaccagctccgccgatcacggccgtgaccacgccaccggccaccacgccggcgatccgcgcgacggcggcaccgaaggacagcagggcgttgccggtctgcaaccggtcgggtgccacgatctgcgggatgagcccggtgaaggcggggaaccccatggctgcgccgacgcccgacaacacggcggccgcacacagcgcataggcattggccacgcccagggcgatgaggctcgccagcgcggtgtacgacacggatgccaggacttggctggccatgatcacgcgctgacgcggcaggcgatcggccagggcaccgccgacgagcaggaagagcaccagcggaatcgactccgcggccaacacgatggacagcagcgaggccgaaccgccgggcagtccgaggatgccgaaggacagcgcgacgggcgcaaatgacatgccgagcgtgttgagggtgcgtccggcgaacagcaagcccacgcccggttcacgcagcagggagaggtcttttcgccaagaattcaccgcagaatgttacgtgaggccggcagtgttctcaaagcgtggccgctcaacgcgaaaacttgcactccgcaggcctccacgccgtgatttgttgcgtcgcatggtgactgggccggggcgcagctggaggccgtggccgtgcgctacagcaccgaccagctggccgaggtggggtgcccgtcctcgtaggggatcaccgcatggaactggctgatgcccgaatcgaagaccaggggcacgaaatagcggtccccctcccacatcggcagttcccccagggcgtcgatgggctgccagcccagcggaccctcctcgttggcctcggggatgtcaccgtgccaagcatcgaccaggaagatgaacccgaattggtcggagccgtctggattgaacccgggccagctgaccgtgccgcgcagctgcatcgagtcgacctcgagatgggcctcctcgcgcagctcgcggcgcatgccggccaccacgtcctcatagcgctcgaccttgccgccgagcccgttgtacttgcccagctggtcatcgtccgagcgggcgatgcgatgcaccatcagcacctgacgccgatcggggctcaggatgaacgccagggtggtgagcgtgggcgtgatcatgtccgcgctcccccggctccgccccgacccacgacgggcgtggcgattccctgctcaggcaaggggatcccagctcggcaggatcgtcggttcggtgtcgagcgctgcgcgcacatcctccggcaggtcggtgaccggcacgaccacctggtagacgtattcgtcgaaccaggagtcgttcatcgtccagtagcctttctcgcccacggtgtcgccccacgagttctcgacgcgccagcgacgcggctcgccgtccaccaggtcgacgccggtcaggcacatggcgtgcgtgggggccgaactgcgcgtggtgagccgctcggccttgtccatggccaggtccacgccgtagacgccctcgtagtcgtgcaggtgggcgtcccacacgcccaggtccttgtcgaactgggccttcacatcgcaggcgaaccacaccggctggccggccttcacagcggcgatggcagcgtccttgagcacttcgagctcggcggtcacgtggttggcggtgcgggcccccaccgcacgattgctgcggtcgatgccgtacagcgtgtgaaggctgatctcgggacgcggatcatgcgcgaccaccgcccacacatcgggatcgggcatgtacttctcggcgaactcccgcggggtgagcgtgccgacgcgggtgaagtcgccgtccttgttgcggtactgccagacgaactcggtgggcggtacgccgaggtgggtggccagcatgcggaaggcggcatccatcgtctccaggcgcacggcatcgggatcatcgtccatctcaatcgcccggcgcaggcgcagggtcgcgcgccgcaggagctccgagaggtgcttgttcatcgccgccgaattcgcggccgagtcggtgtcgggcatcgcgtacttgggcaccaggccgtacttggacaccaggaaggtgaactcgggccaccagcccccgtcaccgatcggcgacgcgagcagttcggccacctcgcggtcgtcgaggcgacgatccgcgtcggcgatcatctgggccaggaaccagttggccttctcgagcttcgagtagaagaagatgaagttctggctgaactcgaagtcgggcacctccagttgcttgatggccgcggcgcgcaacacattgagtccggcgaacgcccagcaccgtccggagcgcttctggtcggtgatcgccgcgtccttgatgagatcgctcatcgacgaatcgatcgaggtgaccaccgtgcgatcgagcgagagcttctccacgtccgtggtggccacggcattgcccatcacgcgggccgcgctgtgccccaggaagtccttggcggccgtgtcggcccatgacggatcgagcacgcgggcctcatcgagggcggccagtgagccctccaccgcagtggtggccagcaattcgtcggcctgcgacggctgcccggtcggctgggctgcggcgcccttcggcttggtggtgggcgtcttcgcccgatcggtgttctcgctcatgggtcctcatcacgtcggtgcgtcacgccgcggaatcgcagcggcgtcggctccagcggccatcgccgcggatgattcaacggtagccgcccaccgaaccggccaccgcaggccaaggggccccggtaggaccggatggtccggccggggctccttggcacgggcgcgtgcgctgcgggagcgctactcctcggtgcgcccggactggcgacgcacggccagtccggtgaacagcatctgggtggccaggcaggcccccactccctcaccggcgcgcaagcgcaggctgaccagcggttccaggcccaggcgggtgagcaccgcgccatgggcgaactcgcggctgacctgccccgcgatgagataggactgcacggccgggttcacctcgaccacggccagggccggcacgctgcccgccagcccgtcgagcacgacggtggagccggcctccacggcacccaggatgacgccggcgagcacggcgaattcggggccgccaacctccgccagcgcgagggccggatcggcacgcagcgcggtgatgtcggtgcgggcgaagatcgcgcgcagcacctcggccttgtgctccaccatcttggcgtcggagccggcaccgatcccagcggcctgctcgggtgtgatgccggtgaacacgcatgccagcgcggaggcgatcgtggtgttgccgatgccgatctcgcccagacagaccacaccgcgctgcgcggcgcgggcaccgagttcacgtccccgggtcaccaggcgacgcacatcggcggtggtcatggccgaggtgttcaccaggtcgccacgcacgtcctcgggacgggccagttcgcaaccagcgaccgggccgccgtcgatgccggcgtcgaccaccatcacgtcgagtccggcgctgcgagcggtgaccacgcccacggcgcgtccttccaacgcggcctccatcacctgacggctgactgactggtcgaaggccgacaccttgtgagcgttcagcgggtggtcggcacccacgagcaccagggtgccgccggtgacctggtcgccgctggcagccaccaggcggtcaagtgcctggtcgagcttgccgagcgatccgggtggggtgagcagcttctcgcccttgtcgcgcgcatccaccacctgttgggggctgggcgcgtgcacatcggaccacagcaccgagctgggatcgtcggggatgggccgggtgatcagtgattccaccggctcggccggggccatgccggccagggcggacaccggcggctcggggccgttgtcgggccagcggtcggtcatcaccacctggtcgaggggcagcttgtgcgaccaggcacgccgctccagccccgggtagggcggacgttcgttgggccagcccaggcacagccagccgagcgtcgtgacgccctcggggaggttcagcaggccggccagctcgtcgggctgcatcagcgtgacccagcccatgccgagtcccagcgcacgggccgtgagccacatgttctcgatggccgccgcgcagctccacatgtcggcgtcgtggaaggtgttgcggcccagcaccccggcagcgggggcgcgacgatcgcaggccaccacgatgcccaggggcgcctcccggatgccctcgagctgcaggtcgaggagccgctgggagcgttcggcggtgagctgacgcgactggcgcatccgctcacgatccgacatcagcgcggcacgctcgcgagtgcgacgatccttgacgatgatgaagcgccagggctgcgactgaccgacgctggggccaccatggcccgcattgagcacctcgcgcaccagctcgtccgacacggggtcgggacggaagcggcgaatatcacgacgggcaccgatcacccggtcgagggccgcctgggtggcctggtcgaaggcccaaccactcacatcacggtcgcgctcgttgaccgatgagtcgtcgcccacattcgggacgggacgttcgaacaggtggtcgcccggcaagggctcgtcagcggggtttgtcgtctcgggatcacgcgcctcatcactcatggcgaacagcctagtgatgggcggcgttccgacggtgacgacccccgcgtcctgggagtccgccccatgcgcctcaggcagcgggcggcaggaccacggtctcgaccggcaaaccggaattggcggcgatcgtcagcccgctgggggccaggccggccttcaccacctgcgcgcccagacaggcgatcatggccccgttgtcggtgcacagggccggacggggacgccgcagctcaatgcctgccgacgcggtgcgggccgccagcaggccccgcaggcgcgagttggccgccacgcccccaccgatgatcatgtgggtgatgccgtggaactgcgccgccgccaccgccttggcggtgatcacatcggccaccgcctcctggaagctggcggccacgtcgttgaggggcacctcgtccccggacaggcgccgggtctccacccaacgggccacggcggtcttgaggcccgagaagctgaagtcgaagcgatgcttgaccatgtcatgaccggcggtgaggccccgcgggaagcggatggccttcggatcaccctgctgggcggccctgtcgatcaccgggccgccgggatagggcaatcccagcaggcgcgccaccttgtcataggcctcccccgcggcatcgtcaatcgtggtgcccacctcggtaattccgccggtgatgtcgtccaccttgagcagctgggtgtgcccaccgctgaccagcagcgccaggcagggcttggcgatcgggcgtgccggctcgtcgtccggatggtcaagcaggtcgaccgccacatggcccaccaggtggttgagtccgtacaggggcttgttcaggcaggcggccagcgccttggcggccgccacgcccaccaccagggagcccatcagtccgggtccggcggtcaccgagacggcgtccagctcggcaaggtcgatgtcggcggtctcgatggcgcgtcgcagggtggggccgatcgcttcgaggtgcgcccgcgaggccacctcgggcaccacgccaccgaagcgggcgtgcaattccaccgaactggccacctcattggccagcaggtgttccccccgcacgatgccgacgctggtttcgtcacagctggattcgatgcccagcaccaatggctcgctcatggcgtgtccttcctggtggcgtcgccgggtgttccggtggcgccgggttcaagcgtgtggacgagcaccagcgcggtggcatggggcccgtagtagttgcgacgttcggacatgcgcacgaagccggcccgctggtacagggccagcgcaccgagattgtcgtcgcgcacctccagcagcatccgggtggccccgcggctggttgcccatgcggtggcggcgtccagcaggcgcgccgcgaagtgccgacgccggtgggcgtgggccacgatgatccgcaacagttccgcatcaggcgcccaggcgctcaccagggcggcaccgacgagtcgtccgtcgacgcgcagcccgaaggcacactggttgtcgcggcacacctcggcacgccaggaggcctcgctccagcgctcatggcccaggaagccctcgaactccagggccaccagctcggggaggtcccccgccccgacctcgaccagctcggcatcatccgggggctcggcgggcgcggcggtcatggcgtccttcggacgcccgggcccaggcggcgatggctgcccgccagcgccgacttgcgggccgacggcggcttcgcatcgggttcgcgcaggtacatcggctcgcgaccggcatcgggcagctgcgacaggtgcgcggccatgaagccggcatcgatcgaggtgggtgcaccggccggcatccgcgacgtcagcagttctgcgaacacggcgacgcccggtccggcgatcggcaggtcgggcagggctgtcggaagggtgacctggggctctcccctgcgacccgtccggtcgtagcgggcccagtagagctccttgcggcgcgcatcggaggcaatcacaaattcgtcgggtgccggcgcggtggcgcgccattgcgcggccatcacgtcgaggctgcacacgcccttgaccggcttgttgccggccacctcgagggtgaaggcggtggccatgcccacgcgcaggccagtgaagggtcccggccccacgcccacgcccaggcgatcgacccgtgacaggccgatgccggcgtcggccagcaggcccatgatggtgggcatcaacagttccacatgggagtggttgtcacccacatgggcactggccaccacctcggagtcccgggccagcccggcgcacacgtcggtggaggtgtcgatacacagggtccacgtggtcattcggtctcctcgggctggtctgcaacatgtggcgcggagcggtgcggggcggtgcccggcacgaaggattcgcgcagtgaatagaggtcttcggtggcccagcgggcaccgtggccgcgcaggtagaccacgcgggtgtcgtcggcagggtcggcgctgcgcacgatgtcgatgtcgaggcggtcgtcggccagtccctcggccagtcccgcaccccattcgaccagcgtcaccgaatcggccatcgacgaatccaggtcgatgtcctccagctcggccgccgagcccatccgataggcgtccacgtgtaccaggtcgggcccgcccaccgaggaatggtggttgcgggccagcacgaaggtcggtgatatcaccgggccgtcgacgtgcagcccgacaccgagcccctgggcgagcgtggtcttgcccgccccgagttccccattggccacgagcaggtcgcccccgcgcaggtgggcggcgagcagctcccccagccgacgcatgtcctcgggtgtgggcaccgggatgctgaccggcagctcggcaccgaggatgaatccgccgggcacctcgcgatcgacctcgaagccgcgcagctgccaccaggtgaccagctcgggaaagtcggcgcgggccatcagctccacgcgtcggaaaccgaggtcggccccgtattcggccgctgcgcgcgccatggcggcggcaatgccctcatgctggtgggtgggcagcacgctcacccgcgacatcgtcagcacctggtcgggctcgaagcccagcaacaggcacccggcatcctcgccgttcaccgcggcgatcacaccggcaccctcggcaatgcgccgtcgcaccgactcggtggaatcactcatcgcggcgggcggcgtggacgcgggacggcgcacgccgaaggcgctgcggatgatggccaggaggtccggcgcatcgtcaatgcctgccagcctcagctgtacctcgtcagtggtcacgaactgccattctagtaaccgcgtccagcccggcttgtcaggcgccgaatccccgtggacgcgatggccacggggcccaccccccgcccacacacacggccagatcgaggccgacgcatgacgccggcatcgggacccggcgccaccgggaacggcaaccggccgggtgtgggagattgctcccccacacccggccggttagtggctgggccagttgatgactgggccagttggtggctgggcagattggtgactgggctggtcagccgcgcttgtacggacgacccgacgacttgcgtcgctgccagggcttgcccttgtaatggccgcccccacgcttcttcaccgggcgcggcggcgcgatgatcgcgcggtactgctcctcgcgcaccggctcgtcatgcggctcggtgcccccggtcagctcctcgagccggtcgccgggacgcatcggatgcggacgctcattgaccccggcatcacgcatgatgcgggccatgcgaccccgcgcacgcggcagcacgagggtggccacgaggccatcctcgccggcgcgcgcggtgcgtccggcacggtgcaggtagtccttcgagtcatgcggcgggtcggcctgcagcaccaacgagacatcgtccacgtcgataccgcgggcggccacgtcggtggccaccagcacgggcacccggccctggcggaaggcatacagcacgcgggcgcgcatgccctggggcaggccaccgtgcagggccccggccatcaggccgaggtcgcgcagctgctcggcggtgcgatcggcgtcacgctgggtgcgcacgaacaccagggtgcgtccgggacggttcgccgcctgggcgatgatcgcggccttgtcgcgggcgttcaccgtccacaattcgtggcgcatcgtcgtgacggaggccttcgccgaatcgacgccgtgctccaccggatcgtgcatatagcgacgcacgatggtgtcgacctgacggtcgagggtggctgagaacagcaggtgctgggcctcgcgcgagatctcgtcgaggatgcgggtgacgtcgggcatgaagcccatgtcggccatctcgtcggcctcgtcgagcacgacctcctgcacctcgccgagctttgcgctaccgcgctcgatcaggtcgatgaggcgtccgggcgtggccacgacgatgtcgacgccgcgctccagggcccgaagctgcggggtgtagctcatgccgccggccaccaggatggtgctgagccccatggccttcgccagcgggaacaacacgtcgttgacctgctgggcgagttcgcgggtgggggccatcagcagggcacgcggctgacgaccgtggcccgtgccactggctgccaggcgggtgatcaccgggatgccgaaggcgagcgtcttgcccgagccggtctgtccacggccgagcacgtcgcgacccgacagcgcatcgggaatggcggcctgctggatcgggaacggcgccaggatgccctgcgaatcgagctcctcgacgatcggctggggcacgcccagctcactgaagcgggtgcgtcccttctggcggcgcacgggctcgacgcggtcgtcatcgcgctcctcgcgacgcacggcgccatggggatgctcggtgcgggcgttgctctcgcgacggcggttggccgttgcgggggcatcatcggggcgtccggtcgcgggctcactggtggtggactcgtcgatggcgggctggtcggtgttctgggtgacggatgcctgctgctcggcagcggactcgtcggtcgcctgctcggcgacggatgtctggttaacgatttcctcgttctcggggttggcgtgctctgggttgacgttgtcggaattggcctgctcggaactggctgccgcggaggaggcggactcatcgtccggctgatcgttggtggcctgcgacggcgtggccggggccgacccggaatcctccggggtggcggcctgctggtcggcggaaacctccgccggggacgatgaccggtcggcggaaacctccgccggggacgatgaccggtcggcggaatcctccgccggggatgatgacaggtcggcggagacctcggccggggacgacgcctggtcggcggaatcctgtgccggggtcgacgactcgcggctcttctgcttgtcggcctcgaacttctcgcgcttggcagcctccatgcggctggtcaggccgtcgagcacctcgtcaccctgcagggcaacgctggcgtcgggccggtccgccggcgtgtcgtgggcagaccgctggtcgcggtcctcgcgtcgatcccacgagcgggagcggtcgtcacggttgccccggcgatcgtccgagcgcgtgtcgcggtcgtagcgattgccacggcgctcgtcgccggaccgatcacgctgggcgctgcggtcgtcgcggtcataacggttcccacgacgctcatcatcgcgattgtaggaacgcggacgatcatcgcggttgtagccgcgcgagcggtcgtcgcgctggccaaaggaacgcgcgcggtcgtcgcggtagccgtgcgaacgcggacggtcatcacgcgagtcatagcggtcgctgcgcgagtcaaagtggtcgctgcgcgaggacgagcgcggacgccccccacggctgcgatcacgatcattgtcgtcacgccagcggtcatcgcgacgttggccgccacgataggaatttccacgcgcagaactgcgctgcccaccaccgctgaaacggtcgtcgcgaccctcgcgcttccatgcggcgcgcgagccggtgcgggacgtccaattgctgctgcggcgctcgccacgggcatcgggggcgtcatcacggccccagccacgcgaacgatcacgatcctcgcgctcatcgcgacgccacggcttgcggtcggaaccgtgattgcggtcgtcccactgcttccggcgacgatccggcccgccacgacggtcacgattgtcgtcgttccatcgtccaccgcgattgtcgcggtcatagcgcccgccacgggaatcgcggctgtcacgggagtcaccctcgaagcggcggcgaccctcctcgttccaggcgtcattgtcgtggcggcgcgaacggcccgcgggacggtagccctcggagccccactgctggcggctcgaccagtcgcgcttgccgcgtgagtcactgcgctcacgcgaatcgtttctgtcgcgtccaccgcgcgagtcattccagtcgcgctgaccgcgcgaggttgatccatctcggccgcgtccaccggcacttgacttgccacgcccgcgtgcggacgagggacggctccacgcacctgacgacttgcggttcgggcgcgcggaattattgttttttggcatcggcactctcatgagggggattagaagcccctacgactagatcctgctgatctcacggggccggaacattgaacatcccaaggaataacccccagtctaacgggccgaacgcatcgccccaccatcgatgcgccgatgcgccagtcgcagcccctcgtcacgagcggttgtgaaccacctgcaccggagctgcacccaccccggatccagctgcctgacgccccaattccccgggatggccaactccccgggatgcccaactgcctaggatgcgggtgtgcgtgtggccatcgtgacggagagcttcctgccccaggtcaatggcgtcaccaactccgtcctgcgggtggtcgagcaactgcgccacgacggccatgaggtgctcatcgtggctcccggcgatcccggcggggttcccgacgcctacgcgggagcgccggtgatcaccgtgccgtcggtgtccatgccgcagtatccggccgtgcgcatcgccaccgccaccacctccaagctggtgaagctgctgggcgacttcgcccccgatgtggcccatatcgcggcacccctggtgctcgggcgcgcagccctgcgggccacccgacgcctcggcataccaagcgtcgccctgttccagaccgatttccccacctacctgggccgatacctgccccgcgcgctgtcccctgcccgggccgaacccttggcctggggcatcatgcgccgcgtccacgccccggcgacgctcaccctggcgccgtccaccgccacccggcaggaactggtgcgccacggtttcggtcgggtcgccatctggggacgcggtgtcgacaccacgcgcttcgcccccacgcgccgcgacgaggccctgcaccgtcggtgggcccccggcggtgagtgcgtggtcggcttcctgggccggctggcccccgagaagaacgtggctgatctgtcggcgctcagcaccctgcccggcatccgatgcgtcatcgtcggggacgggcccctgcgggaccaactggccgcccgcctcccctcggccgtgttcaccggggccatggagggctccgaggtggcccgccacatggccagcttcgacatcttcgtccatcccggtgaactggagaccttcggccagaccctgcaggaggcggcggcatgcgccgtgccggtgatcgcgccgcgtcgcggcggaccgatcgacatcgtgcgtgaagccagcaccggattcctgtatccgcccggcgacctggccgcgatgcgctcacaggtcgcacgcctggtcgcggacgcgcccctgaggcaccggctcggcgaccaggcccaccgcgccatggcgacgcgcacctggccacgactcgtcggacagctggtgcagcactaccgcacggcgatccggctcaccgcgcaggccgaatcacgctgacggcgcaagccccccggtcgcgggcacctcagtcgcgggcacccgcggcccggccggccagcttggccagcacgcccggcatccggtgcgccagcgcatcgggcggatagggtcccggcttggcggccgcggtgagcgcctggatcgaggcccccagcacgccggcccaccgcgccgacaggcccgcagcgagcagggtgccgcagatcccggccagggtgtcacccgagccggcctgggcggtccacgcgggcccctccacggccagggtcacccggcccgacggctccgcgacatattgcgtcgaccccttcagcaacacggtcgcgccatagcgggcagccgcggtgcgggccgccgccaccggatcggcctccacctcggcgcgatcccggccgagcaggcgcgccagctcgccggcgtgcggagtgagcaggcagttgccgggcacggtgtcgggcaggtcgcgcagggcgtcggcgtccagcacggcggggactcctgtcgcaaggcgttcggcgatcaccgatgcggcgtcgtcgcgtgctccccagccacatcccagcacccatgcctcgacgcgtccgggcccgaaggtgaccgacggcatggccgcaccgaccagctcggccgagcgccgggccccgcagaagcggatcatgcccgcgccgctgaacagggcaccggtagtcgacagcacgccagcacccggatagcgctcggagccggtatcgagccccaccacgccgcgcgagtacttgtcagaatcgacgccggggaagggccagtgggcggcgatgtccaccaattcggtggcccacatgcgcggggaggggatctggagcccgatcggggccagctccacgagcccgcaggcctgccgggccggattggccagctggcacagcttcagggcgccgaaggtgaccgtgcgggtggcccggaagctgatcgtgtcgcgcgcacccaccgaatccgccgccaggcccgagggcaggtcgacgctcaacacgggcacccccacgtcggcgcaggcgcgggcgaattccgccaccggctcacgcaggccggcccggccgccgatccccagcacggcgtcgatcaccaggctggcctcggccagtccctcgactgcttcccgggcatcggcgaacacgcagccggctgcctccgcggcggcgcgtccggcctcgtgccaacggctgcccgtgcaccacaccgcgacatcgcagccggcattggccaggtcacgggcggcgaacaggccatctcccccgttgttcccggtgcccaccaccacgagcacgcgggcatggtcgcccaccatctgcaacgcggtcgaggccacatgggccgacgcctccgccatcaggtcctcgcccggatgggcgtcgaaccaggcctgctcagcatcgcggatctgctgcaccgtggcaatggcacgcatctcagttgcgccccggttcgtcgcgttcggcctcgtcgaggtctgcgctgttgcccggttcgttgcccggttcgtcgcctccgggcccatcgcttgcgggttcgtcgcgttcggcgatgacaatggccgtggcgatgccgccgtcgtggctcaatgacaggtgcacccgggtgatgccgagctcagcagcacgtcgggccaccgagccgcgcatcttcatgctgggacgatcgttgtcgtcggagaccacctcggcgtcacgccatgacaggttgcccggcgcaccgagtgccttcgacagcgcctccttggcggcgaagcgggccgacagggagcgtcccgaacgggccaggccacgcaccctggtctcagcagggttgaacaatcgctcgacgattccggggtggcgttccagcatggcgtcgaaacgactcacgctgcagacatcgataccgactccgacaatcattgccccgcctcacgggtgacagcccggcactgttggtgcgctactcgacggtcaccgacttggccagattacgcggctggtccacgtcgttgcccagcagtgtggcgatttcgcaggcgaacagctgcaggggcaccaccgccagcacgggctggagcagggtgctcaccttcggcaacgagatcaccacttcggcgaactggtccacctcgttgtcgtcctgctcggccacggcgatggtgcgggcaccgcgggcacggacctcctggatattgctgaccaccttgtcgtgcagctggtcacggccctgcgggggcaccacggcgaacaccggcatgcccgggttgatgatcgcaatgggtccgtgcttcagctcgccggcggcaaagccctcggcgtgcaggtaggcgatctccttgagcttcagcgcgccctccagggcgatcggatagccaacatggcgtccgatgaagatgaagtcctcctcgtcctccatgcccttggccagcgtgtagatctggtcggcatggtcgagcacggactgcatcttggccggcatggcctcgagctcgtccatgatcgtgcggatctcgtcgccgaacttcatgccgcgcacctgtgcgaggtagagcccgagcaggtagcaggcgatcagctgggtggtgaagcccttggtggacgccaccccgatctcggggccggcgtaggtgtagatcacggcatcggattcgcgcggaatcgtggagccgttggtgttgcagatggcgatcaccttggcgccctgttcgcgggcgtggcggatcgcctgcagggtgtcggccgtctcgcccgactggctgatcgccacgcacaaggtctgcgaatcgacgatcggatcgcgatagcggaattcgctggcgagctccacctcacaggggatgcgcacccagtgctcgatggcgtacttggccaccatgcccgcgtagtgggcggtgccacagcccaggatgatgatcttgttcacccgacgcagcgtctcggggctgatgtggatctcgtcgagcgtgagctcaccctggggcgaatagcgtcccagcagggtgtcggagatggccttcggctgctcgaagatctccttgcgcatgaaccagtcgtagccatccttctcggctgcggtggtgtcccaatcgacgtgataggcgcgggtctcggccgggccgccgtcgaagtcggtcacggtgatgtcgttggcggtgatggtcaccacctggtcctggcccagctcgatggcctcgcgggtgtggtcgatgaacgccgcgacgtccgaggcgacgaagttctcgccctgcccgacgccgaccaccagcggtgagttgcgtcgtgcggccacgatcacatcgggttcctgcgagtcgatggccaccagcgtgaaggcaccgtgcagttgcttggagacctcgcgcatcgccacggtgaggtcgttgccccggttgacggccctgcccagcagggcggccgccacctcggtgtcggtatcggaggtgaactcgacgccctcggcgcccaactcggcgcgcagcgtggcgaagttctcgatgatgccgttgtgcaccacggccacccgaccgtcattcgacagctggggatgggcattggcgtcgttgggaacgccgtgggtggcccaccgggtgtgtccgataccggcatgtgattcgggcagtggacgctcagcgagctccgcatcgaggttggccagcttgccggccttcttgcgatattcgagccgcccgttgtcctgcacggcgatgccggccgaatcgtatccgcggtactccagtcgccgcagtccgtcgaggatcactccggtagcctgctcaggcccgatatagccgatgattccgcacatgcccataagagtacggactcactcaattccttgggtcacggcacgcgtgggcaggcgccggcggggggtggatgtgcgcggtgttgccgcggacgggcatgattgacccggtcaggcggaagccaacctaggaggtgaccccctcggggatcccatgagcaatcctgacggtgcccccggcgccgcgtccggaagtcccttccgcgccgcctatgcaacggcccatgagcaggccctggccaaggcgcttgccgcccggggggtcgacgaacccgatgtcacggcgtcgccctcgcagggcacgacgcccgacagcccgtggatcgagctgccgcgtgcgaagtggtcgcagttggcccatgactcacatatcgcgctggaccaggcgaccgtcgagcggctgcgcagccgccaggacccgaccgacgagcgtgacgtcgaagaggtctacctgccgctggcccagctgatctcgttgctgctgaagaaccgtggccggttgttctccgcccagaacgacttcctgcagctcgacgccgagcgcacgccgttgattgtcggcgtggccggctcggtggccgtgggcaagtcgaccgccgctcgcctgctgcaggagctgttgtcgcgcgacgccgcccaccccaatgtggcgctggtgcccaccgatggcttcctgtaccccaccgccgagctggagcgcctcggcctgctggcccgcaagggcttccccgagagctatgaccgccgtgccctgctcaagttcgtggtggacgtgaagtcgggctgccccgacctgtcggtgccggtctactcgcaggtgctctatgacatcgttcccggagagctgaaccgcatccacaaccccgacatcgtgatcctcgagggcctcaatgtgctgcagcccgcagtggtgggccccgacgggcacaccggcctgaccgtcggcgacttcatggacttctcggtcttcgtcgacgccgacgaggccgacatcgaacgctggttcgtcgagcgtgccgtggccttccgggccagcgccgacgacccggacagcttcttcaagacctatgccgggctcagcgacgaggaataccgctccgaggcgaggaaggtctgggaggcgatcaacgggccgaacctgcgcgacaacatcgcccccaccaagccacgggccaccgccatcctgcgcaagggctcggatcatcgcatcgagagcgtgcgcatccgcaagatctgaggcgctccgcactcggcaagcacgagacgggaggggccgacagctcacgctgtcggcccctcccgtctctgctggtcctgatgtgtgggccggcgtccggccgtctggtccgttcgcgtccggttagctcgtccggcccgtctggctgagccccacccgctcggcgacgaccttggccagggcattggcgatctcatcggcctcgtcctgtgtggcggcctccaccatcacccgcaccagcggctcggtaccgctgggacgcagcacgacgcgtccggaattgccgagcttcttgttggcggcattcgcctccgactggatcaccgggtcgagggccgcacgcaacttgtccacattcggcacgttcaccagtgcctggggaaggcggtgcatcaccccggcgagctcggccaggctcttgcccgtctgggcggcccgggacgccacgtgcagcgcagtgagcacgccgtcgccggtggtggcgaactcgctcatgatcacatggccggattgttcgccgcccagggagaacccattggccaccatgtcctccagcacatagcggtcaccgaccttggtctggtcaaccttcacgccgtgggcgcgcatcgcgtggatgagccccaggttgctcatgatggtggccaccagcgtgtcctcggccagggagtcctcgtccttgagggccagcgccaggatggccatgatctggtcgccgtccacgacatggccgtcggcgtccacggccaggcagcggtcggcgtccccgtcgaaggcgaagcccatgtcggccccctcggccacgacgcgcttctgcagtcccccgatatgggtcgaacccgcattctcgttgatgttgagcccattgggctggccgttgatggccagcacctgtgccccggtggagctgaaggccggcaccgccgtcaccgacgacgagccattggcacagtcgagcaccaccgtgaggcccttgaggctcacgccgcgcagggaacccaccaggtgcgagatataggtctggatgaggctggaatcgggcttgatgcgtcccaccgcggcaccaacgggacgcacccagtcctcatcaaggcgctcctggatgacgtcctcgatcttgtcgtcgagcttgacgccgccgcgctggaagaacttcacgccgttgtcgggcatcggattgtggctggccgacagcatgacgcccacgtcaacgccctgcgactccaccaggtaggcgaggccgggggttgggatgacacccacatcgatgacgtccacgccggcgctggccaggccgctcatcacggaggcctgcagcaactcaccggagatccgggtgtcgcgtcccacgatcgccacggcacggcgcccgtcgaaggcacctgcctcacccagcacatgggccgccgccacggacagcttgaaggccagctctggggtcagatcgtcgttggcgacaccgcgcacgccgtcggttccgaaaagtcgagacatgcgccgaactttacgctgacagcgcccccgccgcgcgggggcaggccgtggcaaggggatatcccacaacgccgaatggcccggccccagaggggtcgagccattcgaagtgggcgcgtggatcagcgcttggagtactgcggggccttgcgggccttcttcaggccggccttcttgcgctcaacggcgcgcgaatcgcgggtgagcagcccggccttcttcagcccggggcggttcacctcttcgtcgatctggttgagtgcacgggcgatgcccaggcgcagggcgccagcctgacccgagatgccgccaccaacaatgcgggccacgacgtcataggcgtcggcggagccggacaccacgaagggctcgttgatcagctgctggtgcagcttgttggggaaatacgcctcaagggtcttgccgttgacggtgtacttgccggtgccgggagtcagtcgcacgcgggcgacggcttccttgcggcgacccaggccgattccgggagcgatgacagccgaacgcgacgttgaggcgttcggagcagctccggtggagtcagcgcgataggcgatctcgcggttgttctcgtcggtgaacggcgtcgtgccggtctcgacgtcgtcattggtggtctgtgacacagtcgaatcctcgttggtcggcgcgctcactgcgcaacctgcttgatttcgtagggctcaggattctgagccttgtgcgggttatcaggcccggcgtaaaccttcagcttcgacatctgctgacggctcagcttgttcttcggcatcatgccccacacggcgagctcgacggccttgcgcggatcgctgtcgagcagctcaccgatcgaggtcgtgtgcaggccaccgggacggccggagtggcggtggcgcagggaaccctcgcgcttgttgccactgatggcgatcttcgaggcattcacgatgacgacgaaatcgccggtatccatatgaggcgcatacgtcggcttgtgcttgccgcgcagcagagtggcagcggccacggcgagatgtccgagcacgacatcctcggcatcgatgacatgccaggtcctggtgatgtcgccaggcttcgggctgtaggttgacacggtcgcagaccatcttccactaggttcacaacgaattctgagagcgctccgtccggctcgcacggcttcggggtcacaagagtgaaacccgagcgcgacgtcacccgacgcaggggcgcaacagctatctaaggtagtccgccggatgtaccccggtcaaactcgcatagccgacttttccccggttcggggccgtacatgcccatgacaggcgtaatagggcctgcagaatgtgccaaaaccttgcgcgtcgcgacggggtgcgggcaatgttgggtcatgagttcaaaggcgaacgcgatgagaaccgtttcctcccccaccgacctgcgcaatgtggtgctcgtcggctccgcagggtcgggcaagaccaccctgttcgagaacctcctgcgggcccgcataccgggctatcgcggcgaacgtgacgatgccgagcgcgcctcggccctgacgcttgccacgatcggcaaccacaatgacaccgccggctccgatgtggtgatcaacctgctggacgcccccggccatcccgacttctacggcgacctgcgtgctgggctgagggccgccgatggggccgtgttcgtggtgagtgccgccgatggcgtcgaccccatcacggccgccctgtgggccgagtgtgccgaggtgaacaagccgcgggcgatcgtggtgaccaagctcgacaccgacaaggccgacttcttcgccaccaccgagctcatccacgaggccttcggtgccggcacgcatccggcatacctgcccctgctgcgcgaggagggcggcgaggtgatcggcaacatcagcctgctcaccggccatgtgcacgactattcgtccggccagcgcgtcacccgcgacaccaccccactggaacgcgcggagatggatgccttccgcgccgactacgtcgagagcatcatcaccgagtccgaggatgaggacctgctggagcgctacttcaacggcgacgacctcgagaccggaaaggtggtggaggcgctgttccgggcgctctaccacggcaccttcttcccggtgatccccgtgctgatggacggcatcggcgtggaggaactgctcggcatgatccatcgcggcttcccgatgcccaaccgtcgcgtgctgcccgcgatcaccacggccggcaacgacctggtggaacccgaactgggcgatcccgccggaccgctcgtggcgcaggtgatccgcacggtggccgacccctacgccgggcgcctgtcgatggtgcgcatctattcgggcaccctgcgcaccgatgccacggtgcacgtggccgggcaccgcgaggcgatgaccggacgcgccctggaccactatcccgaccacgatgacgaggagcgcgtcggccagatcaccgtgccggtgggcaccgacaccgcggtgcaggatgccgccatcgccggccagatcgtctatgtggcccggatggcgcacgcgcagacctccgacacgctgtcggacaccgacgcccccatggtggtggagccctggccactgccccgccccctgttgcccctggcgctgcatgccaccagccgcaacgacgacgacaagttgtccaatgccctgcagcggctgctggtggaggaccccaccgtgagcgtggaacgggaccccgccaccgaccagctggtcctgtggacgatgggccaggcccacctcgacctgctactggcccgcctgaccggacgctacggcgtcaacgtcgaacgcgaggagatcaagatccccctgcgcgagaccttcatcgccgagacggtgggccatggacgccatgtgaagcagtccggcggacatgggcagtacgccttggcgaacgtccgcatcgaaccgggtgagcgcggctcgggcttcgtcttcgccgaggaggtggtgggtggctcggtgcccaggcagttcatcccgtcggtcgagaagggcgtgcgcacccagctggatcgcggcgtgctcagtggatatcccgtggtggacgtgaaggtcaccctcaccgacggcaaggcgcattcggtggactcctccgacatggccttccaggcggccggggccgcggcgctgcgtgatgcggccagcgcggagacggtggcgctgctggagcccttcgacgaggtcaccgtggtctgcggcaacgaatacgttggcgcggtgatgactgacctcggctcacggcgcggacgcgtgaccggccagcacggcggtgacgacgggcgcaccaccgtgacggcactggtacccgccagcgagctgacccgctatgccattgacctgcggggcctttcgcacggcaccggacgcttcgaacgcgagccggccggctatgaactgatgccgcccgagctggcgcagcaggtgctggacgagcggggctgagccccggctcacgcgtcccatggggagggtcccccgggcggggaccctccccatgggacctgatgcggtgccacggcgacgggcgaccgccggtccggccctctgcagtccgaaccccagcagcccgacagtcagcggttcgaggtcgtgctgacgatctgcttgccgaagggcatcacgctgatcgggatcatcttgagggacaccaccgcgttggcgatgcccacgatcgtgacggcctgggccagggcactgatgatgtgcagcagggcgagccaccagccggcgacgatcatccagatgacgttcatcgcggcggtgcccgcaccggcacccggcttgggcacgacggtgcgcccgaagggccacagcacatagcgggccatgcgcaaggatgcgatgccggcgggaatggtgacgatgagcacgcaaccgatcaccccggccaccacatatcccagcgcgagccagacgccgcccaggacgagccagatgacattgagcagtgtggccagtggtttgggcatcgttcctccatgggtcggggcgcctcccgcaggccctgtgtgcccacggatcgaacacttcttgtgagcctaggtcccccatgcccccttttcagccgacgcgtccggggccgtccacggcatgtcgggcgcgggcaaagtaggctgctatcccgtgtcggacaacgcgcgcgtgcaccatgccatggcagacggctctgctggcggccggttcggccccggtggaaccagctccgacccctccggcaccagtcactcaagcgtcgatcccatcaatgggcgccgcggcgtggtctccttcgtacgacgcagcccgcggatgaacgaatcccagcgccaggccctggccagccacagcagcgaatacctggtggaggtgccccacgaccggctgtccacctcggtgcgccacggcgccaccatgagctggccgcaggtcttcgggcgacaagctcccctggtcgccgagattggctcgggggtcggtgactccttggtggccatggcgggtgcccgccccagtgacaatgtgatcgccttcgaggtgtacctgaccgccgtcgcctcgacgatgggcaagctcgcccgcgccgatgtgcacaatgtgcgcttggtcgtcgccgatggtggcgagggcctgcgcgaactggtccggcccggtgagctgagcgaattgtggacctttttccccgatccgtggccgaagaagcgccaccacaagcgacgcctggtgcagccgggcttcgcggcgctggtggccgaccggctggcacccggggggttgtggcgactggccaccgactgggccgactatgccgaccagatgcgtgaggtgctcgacgccgagcccggcttgaccaatgtctactctgatcgtcccggcggctgggcgccacgcccggaccgccccttcacccgcttcgagaagcgtgggctggacgccgggcgcgaggtgcgcgatctggcctaccgtcgcgtccaccccgagggggatggcgagaatgggtgatcgccgcttccgccttgacctcagctatgacggcagccacttccatggctgggcgatgcagccgggccaacgcacggtggagggtgagctggccacctggctcacccgcatcgccggcaccgcacaacccgtccggctcgtcgtggcggggcgcaccgacgccggcgtccacgcgcgcggccaggtggcccacgccgacctgcccgccacgatggacgccgcggaactgaagcgccgactcctgcgggccctgccccccgacatcgtggtgcgtcgcctcaccgtggcgccgcccggtttcgacgcccggttcgcggcgatctggcggcgctatgtctaccggctgtgggacctctcctcgcatcccgatcccctgctgcgcggcatggtcaccaccaagtcgctggacctcgacccggaactgatgaccgccgccgggtcgcggctgctgggcctgcgtgatttcgcgccgttctgccgtcgccgcgagggcgccaccaccatccgcacgctgttgcagtgcgaggcgcaccgggtggcggacgggtgcggcacaatcgagctcaccgtgcgggccgacgccttctgccactccatggtgcgttcgctgaccggcgcgctggtggcggtcggctccggcacccaatccatggactggctcgacgaggtggccgccggcccaacgcgcgccgggtcggtcaccgtcatgccggcccgcggcctgtgcctcgagcaggtcgcctacgcccccgaccacgaactggcccagcgggcacgggcggcgcatgcgcgacgctccctgcctgctggcccggaaaccaccggccccgtcgacagcgacgactgcggctgcggattcgagggatgagccgatcatggacatccgccacgatgaggagccacagatgacccagtacttcgtcaaccccgagggcccggccaagtaccaccagctgcacgccaccatctggggacatgactacgagttccgcagctccaatggcgtcttcagccagtaccgcctggacctgggcacctcggtgctgctgcgcaccctggatccgccggcggaccgtccggcgcgcttcctcgatctcggctgcggcttcggaccgatcgccgtcgcccttgccaccgagtgcccccgggcccgggtggacgccatcgacgtgaacgagcgtgcggtggaactcaccgccatgaacgcgaaggccctgggggtggcgagtcgggtgagcgcgtcggcccccgatcaggtgcccgccgacgtgcgctacgacgagatctggtcgaacccgccgatccgcatcggcaagcccgcgctccacgagctgttggacacctggctgaaccgcctcaccgacgatggcgtcgcccacctggtggtggcccacaacctcggctcggactcgctggcgaaatggctgaccggccagggctggcaggtcgatcgcctcggctcggcgaagggctaccgggtgttcgacgtcacgcgccggcactgagcacccgtaaaccctgggccactcgcaaaaccctcgcctcgcggcgtccctgctgggctagattgtgctgcgtgacccgatgagggaaagccggtgtgaaaccggagctgtcccgcaaccgtgagccgccagcgcggcaagccggagcacctcatggggtccgtactccgtaccgtcgaggcaacggcagaggagtagccgcttcccccgggcgcgctcctctccggagccccgtgaaagccggcgggttccgtaccgccgcccaggaaagccggcgggccctggtccgccgcccagaaaggaagcaccatgaagtcctcacccacccttgccgtcgcagccctcggactgtgcgccatcaccgccctggcgggctgttcctcgtcgacgtcaggctcgtcgagctccccgtcgaacaccgccacggcgctgtcgatgaaggactgcaccagccagggcaaggtgtggctcgtcgtgcagaccgaccaggacaagacgcttgccaaccagtgcgtcggcacgccgagcaccggcaccgccgccctggaggccgccaatgtggcgatcggacgcagctccgacggcaagatgatctgcaccctgggcgactaccccaacccgtgcccggccaccttcaccggggcctactggcagtactacacggccacgcccaacggcagctggacctattccgacaagggcgccgacgactcgtcgcccaaggccggctcgatcgagggctggtgctacggcaccacctgcacgcccaagctcgacggcgtgtccgctgcgccgagtgcaagccagagcgccgaggccagcgccaccagctccgccacgagctccgtttccggttcctgatcggcccctcacgtgagcaggctcctgccgcggcttgcggcaccggtggtcgccgccccggccagcgtccaccgcatggcgcgtcgcagcacccacccctgggcatggtggtgctgggcgatcggtgccgccgcggcagtgagcctcacccacaacctggcgctcatcgtgctggtctgcgccgccgtgatcacggtggtgatggtgcgccgcagcgacgcgccgtgggcccgcgccatgggcctctacatcaccctggcactggtgatcgtcaccatccggatgctcttccagatcaccatcggtggcatccggtacggcagggtgctcttcacgctgccccagctgcaattgcccggctggatggccggcatcaggctgggcggcccggtgacgctggagggcctggtgtacaccgccgccgatgcgggacggctcggcgcgatgatcatctgcctgggtgcggcgaatgcactggcgaatcccaagcgggccctgcgttcggtgccctccgcgctctatgaggtgtccacggcgctggtgatcgccatgtcggtggcaccccaactggtcgagtcgctgctgcgcatccgccgggcgcgccggctgcgcggtggcaccgtgcgcgggctgcggggcctgggcgcgctcgtcatccccgtgctgcaggactccatcgagcgctcgatgagcctggccgcgtccatggaatcgcgcggctacggctccacccgcgacaaggcccgcgtgggacggggcgccgggttcgcgatgctggcctccctggcgttgctgtgcttcggggccttctcgctgctgtcgctggccaacggcgcggtgctgggcatttcgacgctcggtgccggagtggtggccgccgtgatcgcgttgcgctcgtcgggcaggcaactcgcggtcacccactaccgccccgacccctggcgggcccgcgaatccatcacggccctgtgcggcctggccgtgatcggcgtcacggtgcagctcggcatcatcgcgccgaaggtgctcaccccgccggcccagcccgccacctggccggcccttgaccccttgatgatcgtgatcatcgggctgatcctggccccgattgcggccaccaccactcccccggcaggcgaggcatgatcgaattccgcgatgtcagtttcacctacaccggcgccagcgatccggtgttgcacgatgtcagcttccagatccccgagggcgacctgtgcctgctggtgggacgcaccggcaccggcaagtcgacgctgctgcgctcgatcaacggcctggtgccctggttcgacgggggccgcctgaccggcacggtgcaggtcgacacgatggtcaccagccaacaccgcccccgcgacctggcgcgcgtggtgggaagcgtcggccagaacccactggccggtttcgtcaccgacaaggttgaggacgagatcgcctatgggatggaacagttgggcgtggcccagccggccatgcgacgtcgcgtagaggacacactcgacctgatgggcatcgcggacctgcgccatcggcccctgaccgacctgtccggcggccaacagcagcgcgtggcgatcgccgcggtgttggcggcccagccgcgcgtggtgatcctcgacgaacccaccagtgcgctggatcccacggccgcccaggatgtgctgtcgtcgatcaccaccctggtgcacgaggtggggctgaccgtcgtggtggccgagcaccgcctggaacgcgtcatggccttcgccgactcggtggcatggctgcccggcgacgggtcggtgcaggtgggccccgccggagacgtcctggctcgcgccgatgtgcgtccgcccctggtgggcctggcacaggcactgggttggagcaccgtgccgctcaccgtgcgcgatgcgcgccgacgcgtcaaggccgagcacatcgtgctcaccgacccaccgcaggcacccgcacccgacgggcccgtggtgctgaccgccaccaagctggtcgtcgactacggcgagacgcgggcggtcaatgcggtgaccacggccttccgcgccggtgagatcaccgccctgatgggacgcaatggtgccggcaagagctcgctgatgtgggcgatgcagggggccgtcgcgagttcgggcaccctggaggtgaccggagccgatccccgcaccgtcagcgccgagaaggcccgtgaactggtcaccctggtgccgcaaacggcggcggacctgctctacctgcccagcgtgggcgatgaatgccgccaggccgacaaggagagcggccgcgacgagggcaccactgccggcctgctgtccgagctgggcgtggcgctggacatgggccgcgacccgcacgacctgtccgagggacagcgcctggcgctggtgttggcgatccaactgtcctcgcggccgcgggtggtgctgctggacgaacccacgcgcggcctggactacacgacgaaggcccacctggccacgatgatgcgctccctggcctcgcgcggtgtgtgcatcgtggtggccacccacgacgtcgagttcgccgccgccagcaccgaccgcacgatcgtgatggccgagggcgacatcatcgccgacgacaccacccgtgaggcatgcaccgcctccccgaccttctccccgcagctggccaaggtgttctggccgcagccgatcctgacggtggccgatgtgcgtcgtggacgcggccagcaggcagacggggcgacacggccatgaacctgctgacgcgccaccgcgggcctgcgacggccggtggctacctgatgcccctggagccgcgcaagcggctgtccgcccgcacctcggtgatgctcgccgtcaccgccgtgctggggttggtggccttctgctggccgctgttcgtgcgtcccggagccgtgttgggctccgacgcctccggacgtaccgccacccccttcgtgatgggcgccatcatggccgtggtgctggccctgctgattgccgagctgtccaatgaggacctggacgtgaaggccctggcgatgctgggcgtgctggccgccgtgggcactgcggtgcggccggtgagcgcgggcaccgccggcatcgaaaccgtcttcgtgctcctgatcctggccgggcgcgtcttcggcccgagcttcggattcatgctgggcatcctcacgatgttctcctcggcgctcctgaccggcggggtgggcacctggttgccctatcagatgctcggggccggtttcgtggggctgctgcccggcctgttgccccgccgccggccgcgtcccgggtcggtcggtgagatcgtggtgctgtgcctctacggcttcgtcgccggtttcggctacggatatctgctggacttcgcgttctggcccttcaccaccggcctgggcatgggcgcacccggcttcgatcccgaggcaagtccctggcgcaacctgcacaccttcttcgtgctcgacacggtcacctcggccggctggaacatgggccgtgccctgaccaatgccgtactcatcgccctgttgggcagacccctgatgcgcatcctgcggcgcacctcgcgccaggcccggttcgactagcgtcccgcatcggctcaggcgtgggtctccttcaccttgttgagcacctcgggccagtgcttgtccagatggcgtccgcccagccgcacgccggcccagcaggccagcgagccgatgaccaggcccaccacgatggcggcccacccggcccacggcttccaccacgagacgatcgccaacgccaggctgggtgcagtgagcacgatcggcgcgatcatggcaaccatcgagccgaggaagttctcggcggtggttcccgagccgcgcgagaagacattgccgccgggcgcgggcatcgcctgttgccacagggcgcccacgagcgagccgacacccagggatgatccgaaggcggcgatcaacgccccgatcaggccgggcagcaactgccagtcaccggtgaggaacagcgagccgaacagcaccaccaacaaatagggcgcggtgacgatggtgacgctccagcagcgtccgatccggtcctcgcgtccggtgacgccgctgagcacctgcatccacagggcggagccgtcatagctgatgctccaggccagcgtggaggccacgatcacgccgccgagcaccgcggcgaagtccaccgcgaagttggaaccctgcgacatcccctgggccagtccgggcgcgaacatgaacaccggcaccacgatcacggccagcagctggatgagccggcgcgggtcgcgtcgccaataccgcaggtcgcggcgcgccacggcaccgatcgggccacgcggggccaggaagtcgaagcgtccggacttcacggtgccgccgacggcggcgctgtcgagcggtgagaccagggcccgggccaggctgcgttcccacagccgcagcagcgcccagaccagtgccgcagcaagcaccaggtgcgccgccgcgggcaaccatgccccctgcgcgacgtcccagggcagcgcccacgcccagccgaagggggtccacgaggtgatccgcgccgcgatgaagatgacgtcctgcggggcacccgagtcggcgaagatccgcgatccgaattgcatgccgaagctcaccgccatgatcacggcgaagaaggccacgcccccgacgtcacggaagcggcgcgaggccagcacccgcgacatgagcgcggtgagggcacgggcgctgatcacgcaggtggcgacgccgagcaccgcacccactgcggcggccacggcggtgccgagcccgcccgaccagctgatgacggtgcccagcgccagcagtgccgtatcgagggcgccggcgccgagcatggccgccgcgaacaggccggggatgagctggcgggcggtcaccgggaacagggcgaagcgtccgggatcgagcagttcgttgctgccggcggtgaacatggtgatcagcggccagcccagggtgaccaggccgaaagccagggtgagcaccggcccgcgccaggcatccattgcgggggtgcgcatcatcaccaggccgaagaccagcaatgccgtcagcccgagcccgtagatgcccatgatgacggtgccgatgatgcgtcccgtgctggagcggacgccccgccaggcgagcgtcagttggagctttgcgagcgtcccaaccatgaaaggccacctccctcgaggtgatgggccccgacgagctcgaggaagcgctgctgcaggggcttgccctggcgcacgtcgtcggtgtcgccgatcgccagcaggcgtccggccgccatcaccgcaacggcgtcacacagtgtctccaccagttccatcacatggcttgacagcacgacggtgccgccgccggcgacgaactcgtgcaggatctcgcggatggtctcgcccgacaccggatcgactgattcgaagggctcgtcgagcaccagcaggcgcgggcggtggatcagcgcgcaggccaggccgatcttcttggtcatgccggccgaatagtcggccaccatcgtgttggcgtcctcggacaggcccagggtcgacaggagttggttgctgcgatcggtgatggtggcctcgtccatgcggcgcatctggccgacgaacttgagcagctcgcgtccgctgaggcggtcgaacaggcgcaggccgtcgggcagcacgcccatcagggccttggcgcgggccgggtcggcccagacgtcgacatcgcccaccagcacctgcccggcgtcggggcgcagcaacccggtggccatcgacagggtggtggtcttgccggcaccgttggggccgacgagtccgaacatgcagccccgcggcacggccatggacaggtcggcgacggcgagcttggccccgaaggccttgcgcaatccgacgatgctcagtgcgggcgggccgggagggcgcacgggacgggtccgtcccggcgcgaccgaggtgggcaccggttcatccagcgacgggtcgtcgccgatgatccccgccgcagtgggcgcgggcatcggcggtggtggagcgaatcctggcatgggcacgggggtggggatgtgggcccccgatggcgtcgtggcgctctcctggggttcggtgaaggcactgatcaccggctcttcgcgcgcagggtccggaccggatgtgccgcccgggggcggtgtctgttcgctcacggacctttcctaccattggatcaagttcggcctttccctgcccgcgaaactggcgggcccgggaataagcccccatcgacaggaggttgctccaagtgaagggcgcgccacgcaagaccaggtacgtcaaggcaacgcaactgaaagaggacaacatggctgtttacactctgccggaacttccctacgactactcggccctggagccgtacatctcgggtgagatcatggagctccaccatgacaagcaccacaaggcctacgtcgacggcgccaacacggcactcgacaagctggccgaggcccgcgacaaggccgacttcggtgccatcaacaagcttgagaaggacctggcgttcaacctcgccggccacgtgaaccactcggtgttctggaagaacatggcccccaagggctcggcccccgagcgtcccaccgacgagctgggcgccgcgatcgatgagttcttcggctccttcgacaacatgaaggcccagttcaccgctgccgccaccggcatccagggctccggttgggcctcgctggtgtgggatccgctgggcaagcgcatcaacaccctgcagttctacgatcaccagaacaacctgccggccggctccatcccgctgctgcagctcgacatgtgggagcacgccttctacctgcagtacaagaacgtcaagggtgactacgtgaagagctggtggaatgtcgtcaactgggacgacgtcgccctgcgcttctccgaggcacgcgttgcctgagcacaccgcaccgcctgaacaacccgcatcgactgggcagcccgtgtgcccagtccgctggtgaccggcggcgcaccggggaacggccccgcatccctcgtggatgcggggccgttccgtgtctgctgaggaatctcagacccaagcccgtgcgccctccccgacacgccacggggccggttaacttagaaactctttgttttctctcagctattcgctagagtgttgctcggtcctggcacgctcccctcgcgccgaaccccacagatattgtcaactgccgggagacagcacgtgaagaacggtctcaagaccctgctcattggtggagtcggcatcgcgacccttgcggtcggcggcgtcggaactgccatcgcagacaatgaggtatcgctcaacgtcgatggacagcagaagaccgtccatcattttggcggaaccatcgccgacatgctcgacaagcagggcatccagctcggcgatcacgaccaggtgattcccgatgcatcgcagaagctgcatgacggggagaacgtgacggtgcgcttcggccgccagatcacggtgaccttcaacggccagacgcacaccctgtggaccacttccaccaacctggccgagatcctggcccagctcggtgtgagtgacgacgcgaagctgtcggtcgatcgttcgatgaacgtcggacgcgagggcctgaccttcaccgcggtcacgccgcggcacgtgaaggtgattgccgacggcaggaccgtcgaggtctccagcaccgatcccaccgtgggcggcctgctgaagggcctgggcatcgaggtgggtggcgatgacgtcaccagcgccccgctggagtccctgcccgtcgagggcatgacgctcacggtgcagcgtggccatgtcgatgagaagacggttgacgagccgatcgactacgacaccgtgcgtcaggaagatcccagcatcccctcgggcaccacgaaggtgaagaccgcgggtgtcgagggcgcccggacggtcacctaccgcatcaagacactggacggcaaggaagcacagcgcgatgtgctgtcgcagaccgtccacaagcagcccgtcagcaaggtcgtgctcgtgggcacgggccaggctgcctcgggtggcgccaccgacacggccaactcgggcatctgggatcgcattgcccagtgcgagtcgggcggcaactggtcgatcaacaccggcaacggctactacggcggcctgcagttcgcggccagcacgtgggctgcctacggcggcacggcctatgcccccacggccaacctcgcgacccgcgaccagcagatcaccatcgccaacaaggtctacgcagccagcggcctgtcggcctggggttgcgcctgatcagggccgaaggcctgaactgagtctttggtgtgtggggcccctgcccgtgcgcagtccgcgatctcgcggatggcgccgggtgggggcctcaccctttattgacgtcttattgacgtcccccatcccccagcgtctcctggtgcacctgcagcatgcggtgggcacaatcctgccagctgaactgctcggcacgttggcgtgccgcccgacgcatcccgggtcccagtcgaccgatcagctgctcgatcgcctcggccagtgcggtcggacgcgacggcgcccacgcgccccagggaacatggccgctggccggctcgtccaccacgccggctcccggagtgatgatctcgcgcgctcccccgcggttggaagtgagcaccggcgtcccgctggccaacgcctcgagcaccacgagcccgaaggtctccttcggtgagacggacagggacaggtcggccgcacccagccgggccgacagctcacggcgatcggcgatgaagccgtggaaggtaatgggtccgccgcgggcccggctgcgcagggcctcctcgtcgggcccactgccgaagacgtccaggcgcaccggcacgccgcgtcgatggagctccagcaccgcatcaatggccagttgcggatccttctcacgcgacaagcgtgacacgagcaccaacctgagggcggctccggcgtcgcggggcgtccgcggcagcgggcggaactcgctgaggtccacgcccagcggcaccacgcgcacgcgcggcgaccatgccgcgaactcctcggccgcatattgggaggccacgacgacccgatcaaagcggggcacgatccggcggtcgaggaaccccaccatccgtcgcatggggcggcgcgtccgcagccagccggccaacatgtcgtcgaggcgctcgtggctgaacagcaccgaccccaccccgtggtgggtcgcccaccggccggtccaggccagcgtccacttatcagagcactccacgttcgtcggccggaagcggcgcagggcgcgacgcacggcgcccgggcgcacgatcatccgataggtgcccgacacccggggcgaagcgatctggcagacgacgcccgaggcggtttccacctccgcgtcccgcaggccgggcacgatgaggatccgttcatggcccgcggccacgtattcgcgtcccagcccgtccagggccacccgcattccgcccgagtggggcgccacgaaattggcaagctgggcaatcctcatgggcccattgtggtcgcccgggcgcaggcccgccacgtaggcaccaccggcggcccccggcccgggacgtgaaaagacccggtcggtgccccgcacggggccctgaccgggtcagttcagtgcttggtgttcaagctcactcgtggtcggacttctccacggactcctgaacggtgcgctccgccttcttggcttccttcacctcggcactcttggccttggcctcctcggccttctcctccaccgcttcaaccttctcggaggaggcctcgttggccttgtcggccttcttctcggccttggtctcgatgtcggccttcacgtcggcagccttgtcggcggccttgggagctgccttcacagagggcttctcggtgatcagttcgatcacggccatgggggcgttgtcgcccttgcggttgccgatcttggtgacgcgcgtgtagccaccctcgcgctcagccatcgtgggggcgatctcgtcgaagagacggtgcagcacgaacttgtccttgacggtcttcgccgccaggcgacgcgagtgcaggtcgccgcgcttggccttggtgatcagctgctcagcgaacggctgcacccgacgagccttcgtctgggtggtcgtgatcttgccgtgctcgaacagctgcgtggccaggttggccaggatgatccgctgatgcgacgggcttccgccgagacggggaccctttgtgggctttggcatgtcttaatctccaaatgttgggagcgccggagggcgcaccagatcagtactgttcggtttcggcgtagtccgcgccgtcgtcctcgtcctcaaagcgatcggcagcggccagcgggtcgaagcccggggtgctgtccttcagcgtgaggcccaggtcgccgagcttctccttcacttcgtcgatcgacttggatccgaagttgcggatgtcgagcagatcctgctcggaacggctcaccagttcacccaccgtgtggatgccctcgcgcttgaggcagttgtacgagcgcaccgacaggttgaggtcctcaaccggcagcgccatgtcggcggctagctgctcatcaaccgggctcgggcccatctcgacgccttcggcctcgacattgagctcgcggaacaggccgaacaactcaaccagcgtcttgccggccgacgccaccgcatcatgcggacggatcgacggcttggtctccacgtcgacgatcaggcgatcgaagtcagtgcgggtttccacgcgggtggcctcgaccttgtagctcacggtgagcaccggcgaatacagcgagtcaacggcaatgcggccgatctctgcatccgggttgttgttcaacgtgctggacacatagccgcggccgcgctcgacgaccagctccatctcgatggaaccatcgtcggccagggtggcgatgtgcaggtcggggttgtagatctcaacgccggtgggcaccgcgatatcggcggcggtcacctcgcctgcacccgacttgcgcaggtacatggccacgggctcatcctcttcgctcgagagcaccaggcccttgaggttgaggatgatctcggtgacgtcttcgacaacaccgggcagggtgctgaactcgtgctggttcccctcgatcttgatcgaggtgatggaggctccgggaatggagctcagcagggtgcgacgcagtgaatttcccagggtgtacccgaaaccgggctccaggggctcgatgacgaaccgtgagcggaagtcgttgacgacttcttccgacaacgtcggacgctgggcaatgagcatgttttcgtttcctttcggcctcgaccgctatatgacgaggcgacaggtgggttccgggagatcccggatatttcggcgaagcagccggtggccggcgccgcagggcgacaccggccagagcgacctacctcgagtagagctcgacgatttcctgctcgttcacgtccaggacgatctgttcgcgagtgggcagctggtgcacgagcacgcgcatcttgttcggcttgacggtcagccagccgggcacgtcgcgctcgccgaaggtctcgcgggcgatgacgaagggggtcatctcctggctcttggcgcgcacgtcgatgatgtcgagcggggtcacgcggaagctggggatgttcaccttcttgccattcacgaggatgtgaccgtggctcaccatctggcgggcctggcgacgcgtggaggcgaagccggcgcggtacacgacgttgtcgaggcgcgattccaggatctgcagcagcaggtcaccggtgcggccgggacgacgcgaggcctcttcgtagtagcggtggaactgcttctcgagcacaccgtaggcgtaacgagccttctgcttctccttgagctgcagcgagtactcggaatccttcgtacggccgcgaccgtgcacaccgggtgcataggggcgacgctcgaaagccttgtcattgccaaccaggtccgtcccgaagcgacgggacttcttggtcatggggccggtataacgggccattgttcttcagtccttttcagtcggttcggatcagacgcggcggcgcttgggcgggcggcagccgttgtggggcacgggcgtgacgtcggagatcgtgccgacctccaggccgatggcgcccagcgagcggatcgcggtctcgcgaccggagccggggcccttgacgaagacgtcaacgcgcttcatgccgtgatccatcgcgcgacgtccggctgcctcggcagccatctgggcagcgaacggggtggacttgcgcgagcccttaaagccgacggtgccggcggaggcccaggcaatcactgcgccattgggatcggagatcgcaatgatcgtgttgttgaacgtgctcttgatgtgggcctcaccggtcaccacattcttcttgaccttgcgccgcaccttggtcttcgaggcggctttacgactagttgttgccatgaatcctgttctcctggagtcctagttccgcgtccctgcgggggatcagcgggccttcttcttgccggcgacggccttcttgcggcccttgcgggtgcgcgcattggtgcgggtgcgctgtccacgcacgggcaggccagcgcgatggcgacggccctggtaggtgccgatttcgatcttgcgtcgaatgtcggcgtccacggagcggcgcagatcgccttcgacttcgtagttggcgtcgatgaagtcacgcagttcgaccagctgggcatccgtgacgtccttcacgcggatgtcggggctgattccagtggcttccaggattgcatcggctcgggtcttcccgatgccgaagatataggtcagtgcgacttccaggcgcttttcgcgtgggaggtctacaccttggaggcgtgccatcaggcggtacctttcttggttttcagccggtcccccggctgcgaaggtgtacggcgtgaggcgttcccgtcggcctcccggcaatactcaccggcagcgggccccggccttcgcccgggggttcgaccactagtttcctgcggccttgctctcacgttgtgttgtgttgttcccgcccgccggatgattggtccagcgggtggaccggccttgcggccgggttgttcaattgtccagacggactgcgcgtgctcagccctgacgctgcttgtggcgcgggttggtgcaaattacccgcacgacaccgcggcgacggatcaccttgcagtgctcgcacatcctcttgacgctcggacgaaccttcatcgagcctctcctctgctcaacctcggggcacaggccccttggtcatggatgtatttgccaaatcgcgtgatcttcgatcgcgtgatcgttgatcacttatgccggtagacgatgcgcccacgggtcagatcgtagggggacagctccacgaccacacggtcctggggcaggatgcggatgtagtgctgacgcatcttcccgctgatcgtcgagagcaccttgtggccgttgtccagctcaacgcggaacatcgcattgggcagagcctcaaccacggtgccctccaactcgagggctccctctttcttcgccattaactctcaatctcttgatcgccgtcgcgcacagtgcgtaccgtgtcccacgagcagaaaactgcggtgtgggattacgagcacgcgaacgcgttcggacacgagtgaccgacggtccactatacgtcgcccggcaaccacgctcaaatctcccggcgtggcccctgatgggtgccctccaccgccccctccatggccctcctcgccctgcccactgatccggcctgcccattaccccggctcatcgctgacccggcccgtcatgtgcccgacccggcaactcactgcgccattgccggcgcagaccggtagtctgacgggcaccaacaccgccgttggagacaacggccaccacgcatcgagctgctggaggcaacccatggctttcttcgccgtgaactacacctacgatcccgccaaggacgtcgaggcagtacgcccccgacaccgtgagttcctgcgcggactggccgagcgcggcgtgctgcgcgcctcggggccgttccccggcctggagccccagcggtccctgctgatcttcgaggccgacagcgcggaggaagtggccaccttgttggaccaggacccgatgcacaccgaggacatcctcaaggtgcgcgagatcctcgagtggaacccggtgatcggaatcttcgcggtctgagcgcccccccaggcagggcgcgatgcccggctagagcgcgacgccgatcacgatcgccaccacgatgatggccagtacggcagcgatgccgatgccgaccttcgccatcggcaggctcaggtcggcgcgtttgcgcgactggttcacctcgccgggcgcgaggttcgtgtccacctcggccccctgcggggccgagggcacccggtactgcgcgggaagtgcctgcaccaccggcaccaaatcgccggtggtgtgcgcctcgaagagctgcgcgagcaggccctgatagtcctccagggacaggtcaccgcgctcgtaggcggtgttgagccgctgggtgaggtcgtcacgctgggcatcggccaccggccgttggggatcgcggggcggccgtgatccgatcggcaattggctcatgggcccagcctatgtcaggcggatgtcagtcgaggccggcatagctggcgccatgggcctccagctgcgcgcggcccccgtccggctcggtcagcacccacagtccattgggaagcactgcggtagtgttctcccagtgcgccgcacgcgacgaatcaaccgtgaccacggtccactcgtcgtcgagcaccgccgtgtcatccatgcccagggtgaccatcggctcgacgcacaggcacatgccggggccgatcttcggaccccggtgggccttgccgtagttcgggatatcgggcgcctggtgcatggcggtaccgatgccatggccggtgtagtcgcggatgatgccgaagtcacgtccgtgggagtcaatcgactcctccacggcgtgcgagacgtcgccgatgcgccgtccggtgccgatggtggagataccggcccacatggattcacgggtcacatcgctgagcagctgtgagtcggagtcgatctcgcccacggcaaaggtgcgggcagcatcgccgtgccagccattgacgatggcgccgtagtcaatggagacgatgtcgccgggctgcaatacgcggcttccggggatgccgtgcaccaccacctcgttgacgctgatgcaggcgaccccgggatagggcggcaggccccattcggtgccatagcccaggaaattgctggtggcgccatgcgcagccagcacgtcccggccgatctggtcgatctcgccggtggtgatgccgggacgcaccgcgtcgcccatcgccgccagcccctcggccacgaccaggccggccacgcgcatggccttgatctggtcgaggctcttgacctcaatgcgttccacgtgcaacgggctcaacgcccgaccttggcatcgacggcggcggcgatccgggcgcccacctcgtcgaccgtgccgttgccatcgacggccacgagcaggccgcgtgacttgtaggcgtcgagcaggggcgcagtgctggaggtgtagacctccatgcggtgccggatggtctcctcattgtcgtcggcgcgaccctcgagctcggcccgcttgagcaggcgcgcgatgaggtcctcgggatcgacgtccaggctgatcaccgcgtcgagggagtggccatgcttgtcgaggtagtcatccagcgcgtccacctggtgcatggtgcgcggaaagccgtcgagcaggaagccaccctgggcgtccggctggtcgagtcgatccgccacgatctgctcggtgagctcgtcgggcacgaaatcgccggccttcatgatggcgtccacctgcttgcccagcggggtgccattcttcacattgtcgcggaacatgtctccggttgagatcgccggcacaccgtagtgcgtggcgatgcccactgcctgcgtgcccttgccggcgccgggggcgcccatgatgagcagtctcacttgaggaacccttcgtagttgcgttgatgaagttgggaatcgatctgtttgacggtgtcaagccccacgcccaccatgatgagcaggctcgtgccgccgaatgggaagttctggtcggcgcccaacaacacgatggccaccgtgggtatcagcgagatcaacgccaggtacaacgaaccgggcgcggtgaggcggctgagcacataggccaggtagtcctcggtcggcttgccggcacggatgcccgggatgaacccaccgaacttcctcatgttgtcgctcacctccaccggatcgaaggtgatcgagacgtagaagaaggtgaagaagatgatcatcgcgacgtagatcacattgtaccagacggtgtcgccgcgaccattgaggttggtggcgatccacgtggccgccgcaccctcggggcggaacatggcatacaacatcggtaggtacagcatggaggccgcgaagatcacggggatcacgccggcctggttgaccttcatcgggatataggtggtcgatccgcccatcaggcggttgccgaccatgcgtttggcgtactgcaccgggatgcggcgctgcgcctgctccacgaagaccacgcccgccatcaccagcaggcccaccgcgaccaccaacaccagcagcagccagccctggttgccctggtgggcggtcttgatcgaccacatcgacgaggggaagcgcgcggcgatctgggtgaagatcaggatcgacatgccgttgccgacaccgcggtcggtgatgagctcgcccatccacatgatcagcgaggtaccggcggtcatcgtcaggatcatcacgatgatcgggaagacgccgtcggagtagaccaccgactcggtgcaggtgcggtagagctgcccggacacggccatcatggtgaagctggtggcctgcagcacgccgagcacgatggtgagccaacgcgtgtacttggtgatcgtctcctggccggtggcaccctccttcttgagggcctccagccggggaatcaccacggtgagcagctgcaggatgatcgatgcggtgatgtagggcatgatgcccagcgcgaagatcgccagatgcaacagggcgccgccactgaacaggttgatcatcgcgtagacgccggcctggtcaccggtggtggcgtctgatgcacacttctggatggccgcgatgttgacattgggcgcagggatcgtcgagccgatgcggaagatcaccaggatgaacaaggtgaagagcatcttctttcgaagatccggcgtgcggaaggcattgaggaaacccgaaatcacatctgcactctctgttgatggccatgctgttggcgccgcgggcacacgcaagcgcacgggcaaccctgtcatgctaacgcccaaggggggtctggcctagccaagccccgcgcgcacatcctcccagaggaggtgctacaaacttgcggaagcgtcgccgtaccgcatcgagccttgccggacgcggcgtttcatcagtaagttgtcagcgcgagccggccacaacagtggttgtgcgcacagcgtcccatgacggtgcgcatccggtacaagaggccacagaggcgtcccagaatgtcatgacgccgacaagggggttggcagacaatgcaaccgaaagcgacgctgctgagcagtcacgcactgcgcgtcggccgcggggtgccggcgtgatcaagtatctgctgcgccgggtgctgggctggatcggcatgatcttcctggccaccaacctcacctacttcctggccaacctgttccttgatccgaaggcaaactacctcgaacggaatcccccgattcccgatgaccagatcgaccggatgctgcatccctacaacctggatcccacggtctcgttgatcgatcgctggtggacctggctgcaggatgtgctgctgcactggaactggggcatgtcgcccgacggccaggccgtcaacacccaggtggcgttccgggtgtggaactccgcccagctcatgctcggggccaccatcctggcctgcgcagtgggcatcgcggtgggcgtctacaccgcctcacgccagtacaagctgggtgaccgcatcttccaggcgatctcgatcgtggccatgaacacccacatcgtcgtggcgtccatggtggccgtgatcgtggccatcgccatcaacggtgccgccggccagcgcatcttcttcgtcaccggctcggcaagcatcggggtacacggcttcttcccggtgctgctcgacaaggcgcagcacctcatcctgcccaccctgtgcctgttgttcatcaactacgccagctatcacttcatgcagcgctccctgctgctcgacaacatcaacgccgactatgtgcgcaccgcccgggcaaagggcctgaccaagccccaggccatccgccgccacgcactgcgcacctcgatcattccggtggccacccaggtggcgttcgccattccgggcatcttcaccggcgcggtgctcaccgagaagatcttcggctggcagggcatgggtgactatttcgtcaccaccatcgcgaagaacgacatccatggcgtggtggcggtggccgcctttgccggctcttcacgaacgagggtgtagcgggttgagcgtgtcggtggccgggtaggggtcgaggtctccctgaggatggaagttctcacactcgccatctgccggaagacctcgacgtgtcacaccctactttcactacaccttgctggggttacccgcaagtttcggacggttggattggttcaggcggcccgtgtcagggctgccgcgtgttgggcttcgaactcgactggggtctggtagccgatcgctgagttgaggcgcttcgtgttgtagaagtcgtagatccactcctccacgccctgaatggcctgctggggggtgtcccactcgtagcggtcgtagaactcagccttcaacacggaccactgggattcgatcatcgcattgtcccagcacaccccggtgcgtcccattgactggtcgaggtggagttcccggcagcactcatacatctgctcgggggtgaattgcgtgccacggtcggaatggatgatcactttcctgggcgcgttcgggcgaataatgcgagcccggcgcaacgcctcctccacgaggtccgtcgtcatggtcgtcgacatggcggttgcgatgaccttccgggagcaagcgtccttgatggcgcacaggtacacccacccggcccgcgtcctcaggtaggtgatgtcggtgacccacacgcgatccacctgccccgtgtcccagtgtcgcttgacccggtcagggatcgaatgcgtgcgcgtccccggtatcgtcgtcaccggacggaaccggcgcgggctgatgcccgcaaggccctgacggcgcatcgaggccgccaccgtcttacgatccaccaccaccccctcacggcgaagctgggcgcacacacgcaggtacccgtacgtgcttcgggagtccacccatatgcggcgcaccgcctcatccaggcgccgacgcgcccggaggctggggagaagatgatccccatcccgctgctgggccgcaacccacgcgtagtacccggaagtggacactttcaacaggcgggccatccgggcaatcgggtaccgagccttctccgcctgcatcagcgtgtacttctcactcactgatgcttcgcagcgaagaaggccgctgcttttcccaagaactcgttgtccatccgcaggtccgcgttctccttgcggagccgcttcaactcctcgcgttcatccggactcaacgtgctcggcgtcatggtctccttctctgccttcacccacctgcccaacagttggggacccagccccagctcctgggcgacctcggcgatcgtgcgacccgagtcgatcaccatcctcgccgcctcatggcggtactgggccgtgaacttgcgacgctgcctccgcgtcttctcgttccccgtgctcatgacaacaccttcccccagggccaccaggccccgccacatcaggtgtccgaaaaaccagggtaggcccagtctgctctggttgaggtcggtggttgggacccctataacgtcaccgaggacgccgacctgggcatccggctggcggcatgggggtaccgggtcgacgtcatcgactcgaccacctgggaggaggccaccccgcagctgatgccgtggatccggcaacggactcgatggatcaagggttacctggctcttcacgatcgagggtgtaggtggggtctgaatcctccggcttcgagcagactcctcgcgatgtagttggtcaggttccggaagccgagggcggtgccgcgcaggtgttcgagccgcccgttgatggcctcggtggggccgttgctggtgccgggccggtcgaagaacgcgaggatgtccgcggcgcgctgcttcagggtgcggccgagcttgtggatctcgacgagcgccgcggggacgccggtggtgacggcatcgatcacggcttgcatcatctgcttgcccttgtccttgtctggttcgcggtaggcggcgatgacgcgctggtagatgccccaggtcgcttccacttcgacgtgttgctccgcggcgaacagcgcggtgagccgatcgcgttgcttgtcagtgaggaggccaccgccggtatgcagtgtgcggcgagccttgtagagcgggtccccggcgcggcctcgatgcccgagcgtggcctgctggacccgttgccggcaccggtccaggccatcgccggcgaggcggaccacgtggaagggatccatgaccgggaccgcggcggggagctcttcggcggcggcggtcttgaagccggtgaacccgtccatcgcgaccacctcgatctgcttgctccattccttcgggcggcccgcgagccagtccttgaacacggccttcgaacgaccctcgaccatgtccagcagccgagccggtcccgttttgttccgattcggggtgaggtcgatgatcaccgtgacgtacttgtcacccttcctcgtgtgccgccagacatgctcgtcgacgccgatcgtggtgaccccgtcgaaccgtgccgggtcatcgatcagctgccgctccccttcagcgaggaccgcactgttcgccgcggaccaggacacgcccaacccggcggcgacgcgggacaccgagaggtggtcgaggacgaggcccgccaacccccaggccagcccaccgcgagagatcttcgcccgctccggcgcggccttggacgtgtcctggcgccacacccgcccgcacccggagcacttgtaccgacgcacccggatcaacaacgtcgtcggccgatgcccgaacggttcatgcgcaagccgacgcgccaccgtgtcgcgagccacgccctcgcatccgcacttgcgacaccagcgatccggttcagcgacgcgacactcgatgaccgcacgatccggctccacgatctgcccgacggcctcaagaccgagctcatcgagtcggcagaacgtggtcagggagggcgcggtgaaggtagcgtggagcacgtcgaggtcttccggatgggcagtgcaggaacttccatcctcgtggagacctcgacccctaccagaccaccgacacgctcaggcgactacaccctcgatcgtgaagagcccctttgccgcggccatgaccgccgtgggcgccatcctggccgacatcttcgtggtgctcctcgatccccgagtgaaggtgagctgagatgagccagacccctgatcagctcgttcccgatgagtcgggttatgttgccaccgccgacggcgaccagaacctcaacctgccggcacaccgcacgcgccgcatgcggttgtacgtgcgtcgcttctggcgcaacaagccggccgtggtgggcctgggcgtcttcgccttcctcgtgctgtgctcgctggtgggcggcaggttcacgcccttccgctacaccgacatggatttcggcgcgctgggtgcccaacccggcacgccgggctcggtggtacgtcccgatggcacgctggtcaacgccacccacctgttcggcaccaactccggcggcatcgacgtcttcgccatgttgatgcacggcatcggccgttccatgaccatcgccgtctcggtctcgctggtcaccacgctgttcgccgcattcatcagcgcgctggcggcctacctggccggcctcaccgagcgcatcgtgctggccgtgatcaacttcctgctcatcctgccgagcttcctgctcatggcactcatcgccaaccactactcgggcgcctggcagatgctcatcgtggtgatgatcgtcttcggctggatgtatccggcccgtgtcatctggtcgctgtccacctcggtgcgtgagcgcgagtacatctccgccgcgcgcttcatgggggcccgcgggccgtcggtggtgatccgccacatggtgcccaatatcggctccctgctggtgatccagttcacgctgggggtggtgagcacggtgatgaccgagaccggcctgtcgttcctgggcttcggcgtgaagatccccgatgtctcgctgggcacgatgctgcagagcggcgtctcggccatttccagtacaccgtggttgttctggttctcggccggcaccctcaccctgctcaccgtgtcggtggcactcatttccgatggtctgcgcgatgcgctcgacccgaactcagcagccggaggccgggcatgaccgatccgattctgtccgtcaacgacctgcacgtgtccttccccagcgaggccggggtggtcgacgccgtgcgcggtgtctccttcgacctgtaccccggccgcaccctgggcatcgtgggcgaatcgggctccggaaagtcggtcacctcgctggcgatcatcggcctgctcgccgattccgcgaaggtcaccggctcggtcaccttcgacggcaccgagctcctcggcctgtcagaccagcagatgaccaggcaccgcggcaacgacatcgcgatgatcttccaggacccgctgtcgagcctcacccccgtgttctcggtgggtgaccagatcatcgaggcgctcaaggccaagaacccgcacatctccgagtcggacgcccgggcgcgcgccatcgaattgctcggcctggtgggcatccccaatcccgccacccgcgtgaagtcattcccccacgagttcagcggcggcatgcgccaacgggtggtcatcgccatcgccatggccaacaacccgcgggtgatcatcgccgatgagcccaccaccgcgctcgacgtgacgatccaggcgcagatcctcgacctgctcaaggtggcgcagcgcgagacccatgccgcggtgatcctcatcacccatgacatgggcgtgatcgccggatcggccgacgaggtcctggtgatgtatgccggcaagccggtggagcaggcccccgtctaccaggtcttctcccacccgcgcatgccctacacgctcgggctgctgggtgcgatccccaaggtgcaccacaacgacaacgctcccctggtgccgatcaagggcaatccgcccatcctgatcaacctgcccgacggctgtcccttcgccccgcgctgccccgtggccgtggaccattgccgcacccgggagccggcccttgaggtgatcgacacgatcgaccagacggtctcgcaccctgacaccgcgccgggcgaggccgaactggtgcacagctccgcctgttggcgttccggtgagatccatgggggtgagatcgatggcaagccggtgttcccggtgccgccgcgtcccgccagcgacatccgtgagacgccgcgcgacgagcgtgccaccaccatcaaggtggaccacctggtgaagaccttcccactcatcaagggtgcgctgctcaagcgtcgcgtgggctcggtctatgcggtcgacgacatcagctttgatgtgcgggccggtgagacgctgtccatcgtcggtgagtccggcagcggcaagtcgaccacgctgttggagatcatggcaatgagccatgacaccgtgggcgagatcgagctggacggcaagcgcctcaagacactgtcccgcgcccagcgccgcgccgagcgccgcaatatccagatggtcttccaggaccccatgggcgccctcgatccccgtttcaccgtctacgacatcatcgccgaaccgctgcacacgctcggctttccccgcgatggcatcgaggcgcgggtcaatgagctgatgaacctggtgggccttgacccggcacacatcgatcgcttcccgggagccttctcgggcgggcagcgccaacgcatcggcatcgcccgcgccctggccacgaatccgaaggtgctggcgctcgacgagccggtgtccgccctggacgtgtcgatccaggccggcgtgatcaacctgctcgccgagctgcaggccaagctcgagttgagctacttgctggtggcccacgacctgtcggtggtgcgccacatctccgaccgggtggccgtgctctacctgggcgggatcgtcgagatcggcgacgtggatgccgtcttcgacgagagccgccatccctatacccaggcgttgctgtcggcgatcccgatccctgatcccaccgtggagcgcacccgctcacgcgtcgtcctcaagggcgatctgccctcccccaccgacaacgagcccggctgccgtttcgcaagccgctgcccgttgttccagaaccttcccgagcaggatcgggcccggtgcctccatgagacgccggcactgcacgggggcgaaggcgccgatcatctcgtcgcgtgccattttcgctgaagaatgtgctgacatggtcagcagaagacccgctcacccacccaaccaatgaaggcaaggagtgaagaccatgcgatccaccacgacgaaggcgtttgccggtgtcgctgtgctggcgctggcgcttgctggctgcggctcgaattcgggctcgtccaccaagtcggccgacagcaacgccaagctcagctattcgatcaatgagcaggccgccaccaacctgaaggacggcggcaacctgaacctcagtatcggggagatcacgccgcagctcaacatgttccaggcgaacatgactgtggacaccagcaccctgtggaactggtacaacccacagctcatcaagttcacccccagcggcgacatgaagctggacaagaactacctcgagtcggtgaactccgagctcaaggacggcaagacggtcgtcacctacaagatcaatgacaaggccaagttcaacgacggcaccgaccttgactggactgccttccaggccacctggcaggccaacagcggcaaggagcaggagtacaacgccaacaccatcgacggctatgaccagatcgattcggtgaaggccggcgacaacgccaagaccgtggtcgtcagcttcgtcggcccgtatccctggtattcgagcctgttcaacaatgtgctgcatccagccgtcaacagcgccgatatcttcaacaacggctacaccggcggcacgctggccagcgcccaccccgagtggggcgccggcccctatgccctcaccggcttcgacgccaatgccggcgtcgtcaccttcgaacgcaatcccaactggtggggagacaagggcaagctcgacaagatcacctacacggtgcgtgccgacgtgcaggcccaggtgaacgcctacaagaacggcgaggccgacaccgtcgagacgagcacctcggagctgctcacccaggtgaccagcgtggccgacaccgacatccggcgcggcacgcgggcggccaactacctgctcaccatgaactccaagtcggagctgctcagcgacaccgcggtgcgcaaggcgatcgccaccggcatcaaccgcgcccagctgcagcaggtgctcttccagggcctcgactactcagaggccattggtggttccctgacgctgtatcccttccagaagggatatcaggacaacctgtccaaggtggtcgccaagaccgatactgcggctgccacgaaggcgctcgaggaggccggctacgccaagggctccgatggcacctacgccaaggatggcaaggccctgagcctgcgcctgccgctgttcagctccagcaccacctcgaaggccatgtaccaggccttccagacccagatgaaggccgtcggcatcgacgtgcagatcatccagaagtcgtcgaaggacttctccaccacggtgaagaaccgggacttcgacctgctgatctcgggttgggcatcaactgatccgaatggcgtcgccttcttctgccagaagttctgctccgactccacgctcaacaagtcgggcaccggcactgccgagctggacaatctcatcaagggccccggtggcctgacctccctgcagaccgccgaggaccaggaatcgaaggccaatgaactcgaggtgcaggccctcgggaccttcggaatcctgccgatctacaacggccccgagatcttcgcggtgaagaagggcctggccaatgtgggcgctggcgtctacgccacgacccgcgcccagatcggcgacttccccgagaacatcgggtggcagaaggactgatcacgcgatggggctgatgcccacgtcgtccccatgacggcgacgcggagcaccacctgacagcactttgaagggggtcgtggccatgtggccgcggcccccttcaacacgtgttcgggagcgtcgatcaccagaagccgacccgctcccctcccccggcagctgtgagcctcgcggggccctccccccggggaatagaagaggctagactgacgttattagttgcaatctcaactactttgggggcttcatggacaccaccgagaaccgtgtgccggtacagatcggcatcttcagcgtctctgatctgacgcctgatccgaccactggcatcactcccaccgagcatgagcgcctgaagaactacgcgctcatcgtgaagaaggccgaggagatcggcctggacgccttcgcgctcggcgagcaccacaatccccccttcgtctcgtcgtcgccgaccaccacgctgggttggttggctgcgcagaccagcaagatcacgctgtccaccgccaccacgctgatcaccaccgatgacccggtgaagatcgccgaggactatgcgatgctgcagcacctggccgacggtcgcgttgacctcatgctgggccgcggcaacaccggccccgtctacccgtggttcggcaaggacattcgccagggcatcaacttggcgctggagaactacaacctgctccaccgcctgtggcgcgaggaagtggtggactggcagggcaagttccgcacgccgctgcagggcttcaccgcgattccgcgccccctcgacgatgtgccgcccttcgtgtggcacgggtcgatccgctcccccgagatcgccgagcaggcggcctactacggtgatggcttcttccacaacaacatcttctggacgatgaaccacaccaagcgcatggtcgacctctaccgtcgccgctatgagcactacgggcacggccgctacgaccaggcgatcgtcggcctgggtggccagttcttcatgcgcaagaactcgcaggacgccatcaaggaataccgtccctacttcgacaatgcgccggtgtacggtcacgggccatcgatggaggagttcaccgagtacacgccgctgaccgtcggctcgccccagcaggtgctcgagcgcacgctgagcttcaaggacgacgtcggccactaccagcgccagatgttcctcatcgatcacgccggcctgcccatcaagacggtgcttgagcagctcgacctgctcggggagatcctcccggagatgcgcaagggcttcctcgagggacgtcccgacgacatcccggatgcccccacgcacgcctcgctggtcgccgcccgcgacgccgccggggttgcccccgtggagcacgtcaaggtcggtgccgatgatgtgaccggcacctccgacgcccctgagccgccggactcggtgttcgagaagtaagcgtgttgcgacggccggtgcacgccggccgtcgcccacacgtccaggggtcccccaccggacccggcaagaccccagcacgaccgatatgtcacaggagacacgcaagcatgaaggttctcgcaatcagcgccggcatgggacagccctcggccaccaggatgctggtggaccgcctggcggcagccaccgtgaagcacgccggcgccgctggccttgagctggacgagcccatcgaggtgatcgagctgcgcgacatcgccacggaactcatgagctccgagatctcgcgcgttcccagtccccgtgtggccggggccatcgaatcagtggaggccgctgacacgctcatcgtggtgagccccatctacaacacccagccggccgcactgctgtcgttgttcttcgaggtggccgacgacgccatcctgcgtggcaagccggtgctgctgggagccaccggcggcaccgcccgccactcgctggcgatcgatcgcgcgctgctgccgctgttccactacctgcacgccctggtggtgcccacgtctatcttcgccgccaccgatgactggggcagccccgcatcgctggacaagcgcaccgaggacgccgccggctccttcgtgggcctgctggccatgcgcgccggcgtgccgaacaccgacgagctcagcggctcggacaccgacaaggcctcccatggtgacgacgacttcgagctggagaatgacttcgagaccatgctgaagtccatctgagccagataagactggagccatggtgtgctcctcggcccgcttgtccagtgacgcttaggggccgctaactatttaggtgtgcgtgttggggtgcagggtgtagttccattcgccgtgccagttgtggcgggtcaggacgccgttggcctcgaggtcgtgcatctgcttgtcggggatcttgatcccggcggggtattggctggtgtccaggacggcctcgatgggtgcgccggatgcggtggtggtcgcgccgatcgagttcaccacgacctcgcggctggtcaggggccgggcgcgccagttgatcgagatgcgggcaaagagccggtgctcgatcttgttccacttcgaggtgcccgggggcaggtggcagaccgtgatggccaggccggtctcggcggccagggctgccagttctgtcttccacaaccgggtgcggtatccgttggatccgccgccgtcggcggtgatcagcagccgggacgcatcggggtaggtgcgccggcccacggcgagccaccaggagcggatcgtgttgaccgcgaacgcggaagtatcgtgatcgaccccgactgagacccagccggtgtcggctgcgatgtcgtagaccccgtacgggttcaccttcccgagttcggggtcacggaagtcgtgcacgttcaccgcccggggcgcgcccttggggtgccactcgcgcccgccgttcttgaactccccgatgagctccttcttcttggtgtccacactgatcaccgcatcgcccgcggcgatatggtccatgacctgggcgttgaggtaggagaactgcccgtcccggtccggatgctgacgaccctcgatctgcttggcgttggcctgcaggctgaaccctgcccctttgagcagctgcgcgaccttcaccgagctgacccggtgcccgcccgcagtgagctcctcggcaagcttctgcgtcgacagcgtcgtccagcacagggcagactccggatctccccgacgggtgggctccaccaacgccagcaacgccttcacgatccccggatcggtttcggtgatcggcttgcggcccgcaccaggcctgcgcacccgccccgacggcgccaccccggcctccagctcggcaacccccgcctgcacccgcgaccgggaggaccccgacgcacgcgccaccgcaacgatccccccatgacccagcgacctggcctccgcggcgagcgtcaaacgctgcgcacgctcgtccaggtgcggcagcaacgcatcgaacttcgctcgcaacgcctcgacagtctcggggggaatggccatacaccaatgatcccacccacaccactataagacccgttaatttattagcgtgtccttacggacggcgctgggccgaggagcacacccatgtcagctgccttctgatccagcccgagagctcttctctcccccatcacccgtccgggacaggtccgcgaccgaccctgaggcgcgtttccccgtcacggtccctggctgcactcagcgccatgatccgggtgcgcccaccgggccggcgcagtccgtaagattttcaggacaagtggcccggcgggcgcaccaggagccgaggaacctgaaacaaggagggcgcctcccttacgggaagcgccctccttgcttcaggctgggatcaggtcactggacggtgacgctgccaccggccttctcgatcttctccttggcggacgcgctgaacttgtcagcggtgacctcgagcttcacggtgatgtcgccatcaccgagcaccttgaccagctggccgtcgcgcacggcgccggccttcaccaggtcgtcgacgcccacggcgccgccggcggggaacaggtcggcaatgcgcgagatgttcaccacctggtagctgacgcggaacgggttctggaagccacgcagcttcggcaggcgcatgtgcagcggcatctggccaccctcgaagttctcgggcacgttcttgcgtgcacccgttcccttcgtgccgcggcctgcggtcttgccgcccttgccggcttcaccgcgacctacgcggtgcttggtctgctttgccccgggagcgggacgcagatgatggaccttgatggccatctcacttcacctcttccatggtgaccacgtgacgcgcggcctgggccatgccccggaactccgggcggtcaggcttggtcacgacatcgccgatgcgcttgagcccgagggccttcaccgtgctgcgcacgtgcggcttctcggcaacggttgacttgatctgggtgatcttcagctgtgccatcaggccttcacctcgacttcctggcgggccctcagcagcgcagcaggcgtcacgtcggcaacggacttgccacgacgcttggcgatctgctccggctcttcgagcatcttcagcgcggccaccgtggcatgcaccacgttgatcgcgttgggtgagccgagcgacttggccagcacgtcctggatgcccgcgcactcgagcactgcacggcaggcgccaccggcaatcacgccggtaccgggagaagccgggcgcagcataaccacgccggcagccttctcgccctgcacgggatgcgggatcgagcgctgcaccatcggcaccttgaagaagttcttcttggcctcctcgacacccttggcaatggccgcgggcacctccttggcctttccgtacccgacacccacggtgccttcgccgtcgcccaccacgacaagcgcggtgaagctgaagcggcggccaccctggaccaccttggccacgcggttgatggtaaccacgcgctccaggtactggtcccggttccggtcgttgtcacggccccgacgatcgtcacgaccgcgacgatcgttaccctgaccgcgaccgcggccctgagcttgagtattcatcgctggttcttcctttccgtcgtcagagtccgagaccagccttgcgggcgccatcggcgaccgcggcaactcgtccgtgatattggtttccggcccggtcgaacacgacctggctgatgccggcctccttggcacgctggccaatgagctcgccgaccttctccgccttggcggtcttgtcgcccgacatgccccgcagctcggtctccatggtggaagccgatgccagggtgcggccggcaacgtcgtcgatgacctgggcgaacatgtggcgggcactgcgcgtgaccaccagacgaggacgctcggggtaaccgaagatgtgcttgcggacgcgcttctggcgacgcatctgcgaggccttgcgctgcgcaaggttcctgcggtgattgatgttgatcgccatgatcaggcgcctgcctttccaaccttgcggcggacgtgctcgcccgcgtaacgcacgcccttgcccttgtagggctccggcggacggatcttgcggatcttcgccgcaatctcaccgacaacctgcttgtcaatgccgtggatggtgaagctcgtgggggtcttcacctcaaaggtgatgccctccggagcgtccacggtcaccgggtgcgagaacccgagcgcgaactcgagctgcgtcggacccttcgagatcacgcggtaaccgacgccgatgatctccaggtccttctggtagccgtcgtgcacgccgatgatcatgttgttgaccagggtgcgcgacaggccgtgcagcgagcgatgctcgcgctcgtcatcgggacgggacagctcaagctggccctcatcgttcttcttgatcgtgatgggctccgggatgttccaatccaggttgcccttcgggcccttcacagccaccttctggccatcgaggtttacctcgacgccggacgggacggtgatggggagcctgccaattcgtgacatctcacattctccttatctgtctcgttccggtcaccagacgtaggcgagcacttcgccgcccacggacttctcatgcgcctgccggtcggtcatcaggccctgtgaggtcgagatgatcgcgacgcccatgccgcccagaaccttgggcagctgattcgacttggcgtagacacgcagaccgggcttgctgatgcggcgcacgccagcgattgaacgcttgcgatcgtcgccgtacttgagggtgacgacgagcttcttgcccacctcgtcagcctccggatccttcaccgcgtagtcggcgatgtagccctcctgcttcaggatctcggcgattcccgccttgatcttggagctgggcatgctcgtctcgtcgtggaacgcctgattggcgttgcgcagacgggtcagcatgtctgcgatcgggtcggtcatagtcatggctttatagcctctttctcgcaacggtttccgctgggcggacctgctgcgttggatgtgtgttcccgcccccgccggcctgccagggcaggccaccaggcgcagtgtggagcgggccgaagctcaccccgtgttcgggcagtggcgtcgaacggtggatcaccaggacgacttggtcacgcccggcagatcaccggcgtgggcaagggtgcgcaggcagattcggcacaggccgaacttgcggtacaccgagcgcggacgcccgcagcgctggcagcgggtgtatgcgcggacggcgaacttgggcttgcgagcctgcttgaccttgagcgcggtcttagccatgtgagtccttacttcctattgccattgcgccggaagtcccgagccgaggggaccttcgcgtcatcagttgccttgaaggggaagcccaggtgcttgagcagcgcacggccttcctcattgttccgggcggtcgtcacgaaggtgatgtccatgccgcggacacgatcgatcttgtcctggtcgatctcgaggaacatgacctgctcggtgagaccgaaggtgtagttgccgtggccgtcgaactggttggagttcaggccgcggaagtcacggatacggggaagcgcgagcgacagcagtcgatcggcgaactcccacatgcggtcgccgcgaagcgtcacatggcaaccaatggcctggccctcgcgcaggtggaactgtgcgatggacttgcgggccttggtggtctggggcttctggccggtgatggccgtgaggtccttgaccgcgccatcgaggatcttgcgatcgttggcggcgtcacccacacccatgttgaccacgatcttggtgagaccggggatcagcatcgggttgtcgtagttgaactcgtcatgcagggccttgacgatttcctcgcggtacttcttcttcaggcgcggcatctcgggcgcagtagcctgagcaacctcagcaacagcgaggcccgcgtcagcattcttcctggccatcagatctccttcccggtcttgcgtgcgatccgcacgccacgggtgccttcgtactcagaaccgtccgcacgacgcttgctcaccttctggcgctgggcgccgatccgggtgagaacgtccttggaaccatccttgacgagcagctgcacgttcgagacatgcagcggggcctcgacggagatgatcccgcccttcacctgggcgccggacgcatcggcggagtcacgcgtgtgacgacgcacgatgttggcgccctgcacggtgacgcgctcattggccggatcaacggcgatgatctctccgaccacgcccttgtccttgccagcgatcacctgaacgcgatcacccttcttgagcttcatcttcgccatctcagatcacctccggagccagcgagacgatgcgcatgaagtgcttgtcgcgcaattcacgggcaaccgggccgaagatacgagttcctcggggctcactggtggtgccgcccaggatgacggcagcgttttcgtcgaacttgatgtaggaaccgtcaacgcgacggtgcgacttcacagcgcgcacgatcacggccttgacgacctcgccctttttcacactgcccccggggatggcgtccttcacggtgcacacgatggtgtcgccgagcccggcgtagcgacgcttcgagccaccgagaacacggatgcacaagagctccttggcaccagtgttgtcggcgaccttcagtcgcgactcctgctggatcatttcttctcctctgcccaaccggttccccgaggtctcccccagggccttgctggactagttgttgacccctggattttgccagagggtgatgtggcgacgtcaacgcgggcgacgccatcaggtcttcgggtcagcgcgccttctcgacgacggcggtcagacgccagcgcttcgtggcggacagcggacgcgtctccatgatgcgcacgcggtcgccctcgccggcctcgttgttctcgtcgtgggccttgagccggatggtcttggtgatcaccttgccgtacaggccgtgcttgacacggtcctcaacggccacgacaacggtcttgtccatcttcgacgagaccacaacgccctcgcggaccttgcggccggcgcgctcggtggtgctatcagtctggctcatgcctcggcctttccttcacgatccggatcatcgacgatgcccaggttgcgttcctggagcaccgtgtagatgcgggcgatgtccttgcgcacctcgcgcagtcgggagtggttctcgagctggccggtggcggcctggaagcgcagcgcgaacagctcttccttcagcttgaccacctggtcgttgaggtcaccgcgcgactgggcacgcaggtcagcggccttgagcgattcagtctttgccatatcagatctcaccttcatcacgcgtgatgatgcgtgccttgaaaggcagcttgtggatggccagacgcagtgcctcgttggcgacgtccggagtcacgccggcgagctcgaagagcacgcgaccgggcttgacgttgacaacccagaactccggggagcccttgcccgaacccatgcgggattcggcggggtgcttggtcagcgggcggtcggggtagacgttgatccacaccttgccgccgcgcttgatgtagcgcgtcatggcgatacgggcagcttcaatctgccggttggtcatgtacgccggctccagggcctgcacgccgaactcaccaaaggccagctcagtgccgcccttggccatgccacgacgattcggatggtgctgcttgcggtacttgactcgacgaggaatcagcatgtttctcaggctcctgcgttctcggttgcgggcgccgcggcgggtgcactggtcgcagcgtcactgcgaggtgcctgctcacgcgccgcgtcggcacgacggcggccgccacgctcaccgcgcccggggcgacggttcgagcgctgacggctcggggccgcctggcgggcagccttctgagcggcgcgctcggcacgagtgccggtgacgtcgcccttgtagatccacaccttcacgccgatgcggccgaaggtggtgcgggcctcgtagaagccgtagtcgatgtccgcacgaagcgtgtgcagcggcacacgaccctcgcggtagctctcggaacggctcatctcagcaccgccaagacgaccggagcagcggatgcggatgcccttggcgcccgagcgcatggcgctctgctgcgccttgcgcatcgcgcgacggaaggcaacgcgtgcccccagctgctcggcgatgccctgggcaaccagctgcgcatcggtctcggggttcttgacctcgaggatgttgagctggatctgcttgccgctcatcttctcgagctcgccacgcacgcgctccgcctcggcaccgttacgcccgatgacgatgcccggacgtgcggcatacaggaagatggtgatgcggtcgctgcggcgctcgatctccaccgagctgatgccggcgcgctcaaggttcttgacgagccaggcgcggatcttgtcgtcctcgcccaccagttccgagtactgcttctcggcgtaccagcgtgacttgtgatctgtggtgatacccagccggaagccgatcgggttgatcttctgtcccacgctcaggcctccttcgtgtcgtcagatgtggtgtccgcggcggttgccttggacgagttctttgcactcgacgccttcttcagcggcggatgcccggcggtctctgccggttcaacgacagcggtgatgtggctggcgcgcttgagaatgcggctggcggagcccttggcgcggggccggatgcgacgcatggtcacgccctcgtccacgtagatctggctgataaccagctgctcgttgtgcaggccctcagaggtctcggcgttggccacggcgctctcgatcaccttgcgcaccggctccgcagcagcctgcggggcgaagtgaagggtggcgattgcctgggtggcgtccatgccgcgcaccgtgtcggccacgcgacgcaccttctgggcactcatccgaacgtgacgcgcgatggcgtacgagccaggacgatccccgagcagggcaacgcgacgactgggtcgctgtgtggtgttgctcatcgaattcattccttctctgccgcgctcagcgccggcgagccttcttgtcgtccttcacgtgaccccggaaggtgcgcgtgggcgcaaactctccgagcttgtggccgatcatgccctcggtaatgaataccgggacatgcttgcggccatcgtgcacggcgatggtgtgcccgagcatgtcgggggtgaccatcgaacggcgcgaccacgtcttgatgacggtcttcgtgccgttctcgttctgcacgtcgatcttcttctgcaggtgcccgtcgacgaacgggcccttcttcaagctgcgaggcattatctcctggctcccactcagcgcttcttgccggacttgcggcgacggacgatcagcttgctgctggccttgttcttgctgcgggtgcggcgttccttctggccccaggggctcaccggatggcgaccaccagaggtcttgccctcgccaccaccgtgcgggtggtcaacggggttcatcacaacaccacgcacggtcgggcggatgcccttccaacggctgcgtcccgccttgccccaatggatattggagtattcggcgttgcccaccgaaccgatcgtggcgcggcaccgcacgtcaaccatgcgcatttcgcccgaaggcatgcgcagcgtggcgtactgaccctcgcgggcgaccagctgaatcgaggcaccggcactgcggccgagcttggcaccgccaccggggcgcatctccaccgagtggacctgcgtaccgatcggcacattgcgcagcggcaggttgttgccgggcttgatgtcagccccgacaccggcgtacaccgtggcgccctgctccaggccctgcggcgcgatgatgtagcgcttctcgccgtcggcatagtgcagcagtgcgatccgggcggtgcggttggggtcgtactcgatgtgagcgaccttggccggcacgccgtccttgtcgtaacgcttgaagtcgatgatccggtaggcctgcttgtggccaccgccgatatggcgtgtggtgatgcggcccgagttgttgcgtccacccgtcttggatttcggggcgagcagcgacttctccggagtcgaccgggtgatttcgttgaagtcagacacactcgacccacgacgggccggtgttgtcggcttgtacttacgaatagccatgaggtctcttcgttccttgtctgc

SEQ ID NO: 7 - DNA, 2656772 bp, Propionibacterium freudenreichii (residues 1,328,387-2,656,772 of 2,656,772)
  source 1..2656772: mol_type = genomic DNA
gcgtcagctctcggtcactcggccggagcgttcccgaaaatgtcgatgtggtcgttctcggcgacagtcacgatcgcacgcttcgtgtcggggcgcctgcccacgccgtagcgcgtgcggcgcttcttgcccttccgattggcggtgttcacgccaacgaccttgactccgaacacggcttccacggcctggcggatctcggtcttgttggccttggggtcaacgatgaacgtgtacttgttctcgtcgatgaggccgtagctcttctcgctcacgacgggcgaaatcagcacatcgtggggatcgcggatcttgaagtcgctcacttggccttctcctcaacagcctcggcctcgcgcgacgtggcgacggccttgacggacttgcccttggcgggacctgccacatacgccttgatggccgactcgctgaacacgattgcgtcagcaagcagcacgtcgtaggtgttcagctggtcccagctgacgacatggacgccgatgagattgcgcatcgacagccaattgttctcgtcgctgcgctcaagcacgacgagcacgcgaccgtaatcgcccaggcccgcaatgaccttggcagcggacttggtgctcggcttgtcgccgccgacgaattcgctcaccacatggatgcggccctcgcgtgcccggtcggacagggcgccgcgcaatgcggtggccaccatcttcttgggggtgcgctggctgtactcacgcggctgcggaccgtgcgagataccgccgccggcccactgcggggaacggatcgaaccctgacgagcccggccggtgcccttctggcgccacggcttcttgccgccaccggagacctcagcgcgggtcttggtggagtgggttccctgacgggccgcggcgagctgagccgtcacgacctgatgcatcaggggcacattcgcctgcgcgtcgaagagctcgccgggcagctcgacgctgccggccttcttgccctcggcgttcacgacgtcgatcgaggtggtctcgttcacttggcttcacccttcttggcagcggtacgcagcacaacgagcgcgcccttgttgccgggcacggcgccgcgaaccaggatcaggcccttgtcagcgtcaacgccggcgacggccaggttctgcacggtcttgcgggcgttgcccattcgaccggccatgcgcaggcccttgaacacgtgacccggggtggcgcaggcgccgatgccgccgggtgaacggtgcttgcggtgcacgccgtggctggcgccgaggcccttgaagccccaacgcttgacgacgcccgcagtgcccttgcccttggtcacgccggtgacgtccacgacgtcatcagtgctgaaggtgtcgggcccgagctcctggcccagggtgtactcgctggcatccgacgtgcggatctcggcgaggtacttgcgcggcgtcaccttggcgcgggcgaactgccctgcagccggcttggtcacggactttgcgcggatggccccgtagccgagctgaacggccgagtagccatcggtatccggcgtgcggacctgcgtcacgacgcagggaccggcctggataacggtcaccgggacgaggcgattgttctcgtcccacagctgggtcatgccgagcttggtgcccagcagccccttcactttgtgttcggtagtcatgttctgcggcctcacggaagcttgatttcgatatcaacaccagcaggcagatcgagccgcatgagcgagtcgactgtcttgggcgtcgggtcgaggatgtcgatgagccgcttgtgtgtacgcatctcgaactgctcgcggctgtccttgtacttgtggggcgaacgaatgacgcaccacacgttcttctcggtcggcagcggcaccggaccggcgaccttcgcacccgttcgggtaacggtgtcgacgatcttgcgcgccgacgagtcgatgacctcgtggtcataggcacggagcctgatgcggatcttctgtcccgccacggttgttcctcttctcgtccctgcttggccggatcgccggccctgcctggttgtgacaagagaaaacccacaccgaaaactctccgttttcgccgctattctcccttgtcaatgccatgttgcacggtacccgaggtcgggtgtgtcggactccgctcaccggcgcggatgaacatccgcgggattggtggcggccacgaacgaaccgaccaggggtcggcccacctcaagcgacctcgcgttccccggaccgtcttcaccacccaatcggaaccttccggtccctcttgcgcacgcaaagctgcccgaggagcaacctaaccagtttttcacgattggccgcatgacacaaatcgggatgacgacgtcacccctgccccacggccgacggatgcatgccccgcacctgccgcgcacggcccggtgcgggtcgctcaatccagggcgtcgtcgtcatagggctgcttggtccacacggccatccgctgggtcaggtgctcgtgcaccgacagcgggcgaccgtcgacttcgatgatcggcgtgcacccatagctcaccgacaccaaccatgccccgtcggcgctgaagatctcctcggcgcccaacaggccgtcgaccacctcgaatccctccgacctcgcgccggccaccgcggcccgcaccgtcatcgagtcgaggacgccggtgccctcgcggctggtggtgcccagccgaccatccttggcccagatgaggcccgcccgcggcgcctccaggcagtagccgtcggtggtggtgaacagcacatcgtcgaagccccgggccgtcgcgtagcggaaggccgacatattcgtggcataggacagtgtcttgaccccgccgagcagccacggcgcatcgacgaaggcatcgtggggacgtccgatggacagctgggtgacgcggatctgcgccggatgcgcgcgcttgcccttgatgtcgctcagcagcacataggcgaggtgctgggccgggtcatcggtgacgacctcacgaccccggctgaggatgagtcggatcaccgcgttgtggccatgccagacgtccaatgcatcgtcgatcgcacgacgccaggcgtcgcgggaggggcactcgatgcccatgccctgcgccgagcgctccaggcgggccagatgccaatccaggtgcaggatccgtggcccggtgacctggcggtagaccacggtggagtcgaagaccccctccccccgggtcagcgcgaggtcgtcggccatcgcgatcggggcgttggaatcgacgacgcctgtgcccagcacggaaatgatcatggtcgaagtctgccccatcgggtcgtggccgtggtggtgaaccgcactagagggtctcgcgcaggccggcgatgcgggccaacacggaggcgcggcccaggatctcgcagctctcgaacaggggcgggctgaccttgcgtccgctggtggccacgcgcaggggcgcgaaggcctggcggggcttgatgcccatcgcgtcgaccagttcgtcgcgcagggcctgctggatggcgtcagcggtgaacggctccacggtggccaacaccttcgcggtggcatcgagcacctcgccggcgttgtccttcagctgggcgcgcgccgtgtcctcgatgtagaccgagtcgtcggcctccacgaggaaggcgatctggtcccaggcgtccgacagcttcaccaggcggggcttgatgatcggggtggccctgcggatcacctcggcccatgagggatcgggatcgtcaccccattgacgcgacgcggcgatgaaatcgaccagctggtcggcaaggtcggaatccgacagctcgcggatgtactgcccgttgagccaatcgagcttcttggtgtcgaacaccggtccgacggtgttgaccttgctccacgcgaagttcccgacgaagtccgcgaagctctccagctcctggtcgccctcggcgggcggataggccagcagctgcaggaagttgcgcagagcctgcggcaggtagccctgttccttgaaccacatgagccgggcggcagggttcttgcgcttggagatcttcgaatggtcggtgttgcgcaacaacggcatgtgcgcgaacgccgggagttcccagccgagccacttgtacagcagcaggtgcttgggggtggagctgatccattcctcgccgcgcaccacggtgttgatcttcatctcatggtcgtcgaccacgaccgccaggtggtaggtggggaagccgtcggccttgaggatcacctggtcgtcggggaagggggccttgacctcgccacgaatcaggtcatggaacaccagcggggcatcatcggggatgtacatgcgcaccaccggcgtctcggtgaagcccgggagcttggcccgctcctccttggtcatgccgtagcacagccggtcgtagcgggtgtcctgcttcttcgcggccttctcctcgcgcatcgccgcaaggcgctcctgggagcaccagcagtggtaggcgtggccggaggccagcagcttgtcaaccaccggacgataggtgtccaggcgctgcgactgcgtgtagggcgcatagggaccgccctgctcgggcgactcatcgggcgtgaggcccaaccagttcagcgagtcgacgatctgctgctcagatccgggcaccaggcggttgcggtccgtgtcctcgatgcgcagcacgaactgccccccggtcctgaccgcccaggccttgtcgaacagcgccatataggcggtgccgacgtggggatcgccggtgggagaaggggcaacgcgggtgcgagcaggagtcgtcatagtggtgccgagtgtaccgagacccggcggatcaccgctgcacggtctattgggacgcagcggaacaccgccgcacggcctatcgggacgcactgtcgggacgcagcagatcaccgctgcaaggcctatcgggacgcactgtcgggacgcagcagatcaccgctgcaaggcctgccgggacgcactgtcggggcgcagcccaacaggtcggccgctcatccctgatggcgcaggcgcagcttcggcccgtcggagcggaccgggaggaaaccggccttcgccagcaccccccgtgacgcgtggttggtcggatcgacctccgccagcacggtggaggcgccatgggcatgcgcccaagcagtgagcgccaccagcgcctcggaggcatatccgcgacgccgcacggagtcggcgacgccgtagctcacctctgcggcgccacgttggtcgggtggggtgtggaacccgatatcgccgaccaccagaccgtcggcacggcgaaccatgaggtagagcccgtagccggggacccagttgtcgacctccagggcatggcgttgcatgcgcgccgcagtgtcgctgtcggcgtgcgggtagccggcaacgcacggcagcggcgagatgccacgggcaagctgctcggcctgggcgggatccacgccgtgcaacaccaggcgtgccgtggggatctccacctctgcccgcgcagggatgtgcccgggggtggcggcacgcggaccgcgcggtgccgcatgctcgcgtccgctgccgggatcccccgtccgacccccgtcgcctgccctgtcccgatcactcaccctgcaatcgtgcccgtatgccccgcggcaggcaatggcggtgacgaacttcgacgcgccccggcaataggctggtcgccatgccatccctgcgtccgtcgtccgcgtccacaggtcggttgcggcgcatggtgacggccccgcagcgacatccccaactgtggttggcgctcatctgcctcatcgcactggccgcctacctggtgaccagcatcgtgaagttcaaccggctgcgcgacggcatggacatcaccatcttcgaccaggcgatccgaagcttcgcgcagggccacgccggctatacgacgctcaaggcgcccggcatgccgatcttcggcgaccacttccatccgatcatcctgacgatggtccccctctactggctgtgggacgacccccgcatgctgctgatcacccagggcatctgcatcgcctgggcgggctggctgctgggccggctggcgatccgtcggctggggcccggaaccggactgctcatcgcggccggcttcctgtgcggcatcggcacccagtacgccatcatcttcgacttccacgagctggtgttggccaccccgctgatggcgatggccctggccagcttcattgaggcgcggtggacggcctgctgggtctggtcggcatcactcatggtggccaaggaggacatgtgcttcctggtgggtggcatcgcgctggccatgttggtgcgtcggcactgggtccggggcctgtccctggggatctttgccgtggcgtggaccgccatcgcggtgttcgtcgtggtgcccgccttcaatcccgaccacgtctatccctatctgcacgcggtcggtgcggtggcggtggcgggggtgcagacgagcgcacacggcgcctggttcggccccctgaagacgctggggagcgccgccatcctgttgtcgggaaccgccttcgtggccctgcgctcgccgctcatctgggccttcgtggcgccattcctcacccgtgcggtctcgaagaacccgcagcactggaccaccggcttccactacaacctgttgcccatgctggtggcctgctacgccttcgtggaggcctggccccgcctggtggacgctgcgggccggacgctgcccggccgacgcggcaccctgcgacggtggtggcgcgcggtggcgctcccgatggtgggcatcgtcgccctggcgtcgatccccctcgggccgttgtggcatgagtggaccatcggacgttgtcgcgacgagtgtcgggtgttccccgccgcgctggcgcagctgccggcgggctcgagggtcgccaccgatgtgtacctgaccagtcatgtggcggcgcatgccgacgtgtcccagtggcgcccgcccgactatctggacgaccgtggccagccggtgacccccgattggctcctgctggatcgcgagaccatcagctaccagaacaaggactcccattgggtggaccagttcctggccgatcccgtggtgcgtggcacccgctacgaggtggtctggcagcgcgatcccatggtgatcctgcgcccggcccacagctgacgggcggccccgctcccccgacacgtcctcacgccgcgccctcctgtggtggatccgtgcccggccccgtgccgggccacgcaccgccgccacgacaacaagaaggccaggacacaaagaaggccaggacaagaagaaggcccgctcccctgggggaacgggccttctttcagagtgcttggctagcgcaagctcacttgacgatctcggtcacgcgaccggcgccgacagtgtgaccaccctcgcggatggcgaacttcaggccgacctccatggcgatgggcttctgcagctcgacctccatgtcggtgttgtcaccgggcatcaccatctcaacgccgtcgggcagcacaacggtgcccgtgacgtcggtggtgcggaagtagaactgagggctgtagtggctgaagaacggcttgtgacggccgccctcgtccttggtcagcacgtagacgctgcccttgaactcagtgtggggggtggtggtgccgggcttggtgacgaccatgccgcgctccacgtcctccttcttcgtgccacgaagcagcagaccgacgttgtcgcccgcctgaccctcgtcgaggatcttgcggaacatctcgacaccggtgacggtggtggtctgggtgtcggccaggccgacgagctcgacggtctcaccagtggtgatgacgccacgctcgatacgaccggtcaccacggtgccacgaccggtgatggtgaagacgtcctcaacgggcatgaggaacggcttgtcggtgtcgcgctcgggctgcgggatgtagtcgtcgactgcatccatgagcttcatgatctgctcggcccacttctcgtcgccctgcagggccttgaaggccgagacgcggacgaccgggcagttctcgccgtcgaactcctgggcggtgagcagctcgcgggtctccatctcaacgaggtcaatgagctcctcgtcgtcgaccatgtcgcacttgttcagggcaacgacgatggcggggacgccgacctggcgggcaagcagcacgtgctcgtgggtctgcggcatggggccgtcagtggcggccaccacgagaatggcaccgtccatctgggcagcaccggtgatcatgttcttgacgtagtcggcgtgcccggggcagtcgacgtgcgcgtagtgacgcttctcggtctggtactcaacgtgcgagatcgagatggtgatgccgcgctgacgctcctcgggagccttgtcaatatcgtcgaacgcctcgaacgagttccactgcgggtacttgtccgcgagcaccttggtgatcgcggcggtaagcgttgtcttgccgtggtcaatgtgtccgatggtgccgatgttgcagtgcggcttcgtccgctcgaaatgggcctttgccactggggctcctcctgatgtcgcgtcacgctggcttgcgggacgcccgtgtttgggtttcttggttatgcgagttcacatgctgtgccggcactgttgccggccgcggtgatacacgggcgaaacccgtgaaccttatcaattgttgtccacgcatcaagcagagtcaaacgccgatgcgcagggtggtttcccgcccgctaagccgtagcatacgcgggcgggaaaaccggtcgatcactcggtgccgtgcgccttggcgatgatctcgtcggcgatgcccttgggcacgatgccgtacgactcgaactccatggtgtacgtggcctggcccgaggtcttcgcgcgcaggtcgttcacgtagccgaacatctcggccagcggaacggtggcgcgaatcaccttgttgccatgctcgtcggccatctccttgacccggccgcgacgaccattgaggtcgccgatcaccgtgccgaggtactcctccggcgtggtcacctcaacggcgaactccggctcgagcagggcgggatcggcgcggcgcgcggcctccttgaagaccatcgaaccggcgatcttgaaggccagctccgaggagtcgacgtcgtggtaggcgccgtcggtgagggtcaccttgatgtcctccaccggatatccggcgagcacaccgaactgcatggcctcctggataccggcgtcaaccgcggggatgtattccttcgggatacgtccaccggtcacggcattgacgaattcgtagccggtgcctgcgggctggggctccaggtcgatgatgaccttggcgtactggcccgaaccaccggactgcttcttgtgcgtgtagtcgatgccggtgaccggacgacgcagggtttcgcggtaggcgacctgcggggtaccgatattggcctccacatggaactcgcgcttcatgcggtcgatcagcacgtcgaggtggagctcacccatgccggcgatgatcgtctggccggtttcctcatcggtgtgcacctggaaggtcggatcctcctcggcgaggcgcgagatggccacgccgagcttctcctggtcggccttcgacttcggctcgatggcctgctcgatcacgggatcggggaaggtcatcgactccagcgcgatcgggttctgcggatcgcagagcgtgtcgccggtgccggtgttcttcaggcccatgacggcgcagatcatgccggccggcatttcctcgacctcttggcgcttgttggcgtgcatctggtagatcttgccgatgcgctccttgttgcccttggtcgagttgagcaccgactcaccggtggtcagcacgcccgagtagacgcgcacgaaggttagacggcccaggtgcgggtcggccgcaatcttgaaggccagcgcggcaagcggctggtccttggcgggatggcggtcgatctccaccgactcgtcgcccggcttgaagccgacgacggcggggatgtccagcgggctgggcaggtagtcgacgatcgcgtcgagcaggggctgcacgcccttgttcttgaacgaggtgccgcagacgacggcggtgaaggcattggcgagcacgccacggcggatggccgccttgaggtcctcgttggtccagtcctcgccacccaggtacagctccatgaaggtgtcgtcgttctcggcgacggtctcgatcatctcggcgcgggtggccttggccttctcggccagctcggccgggatctcctcgacctcgtagtgctcgccgagctcggtctcgccacgccaggtcttggcgtccatgtcgatcaggtcgatgatgccgatgaagtcagcctcggcgccgatcggcagctggaggagcaccggcacggcgtgcaggcgctcacggatcgtctggacgcaccagtcgaaggaggcgcccgtgcggtcgagcttgttgatgtagcaaatgcggggcacgttgtacttgctcgcctgacgccacacattcatggtctgcggctccacgccggcaacgccgtcgaagacagccacagcgccatcgagcacgcgcagggagcgctccacctcaacggtgaagtcgacgtgcccgggggtgtcgatgatgttgatctggtagttgttccagaaacaggtggtggcagcagacgtaatggtgatgccgcgctcctgctcctgctccatccagtccatggtggccgcgccgtcatgcacctcaccgatcttgtggttcacaccggtgtagtacaggatgcgttcagtcgtagtggtcttacccgcgtcgatatgggccatgatgccgatgttgcgcaccttggccaggtcggtctggagatcgatggccacgaagttccaacctctgttcttgaagttaaagagtgtttacaaagtctttggagcgggcctgcgcccacttcttggtgcagtgggcgacgcccacggcttgatggggtgggcacgtgcccacagcagggcagtacccccgcccggtggggcgggggtctgtcaatggttttctaccagcggtagtgcgcgaaggcgcggttggcctcggccatacggtgggtatcttcgcgcttcttcaccgaggcacccaggccattgctggcatccaggatctcgttctgaaggcgctcggccatcgtcttctcgcggcgatcgcgcgagaagctgaccagccaacgcatggccagcgtgttcgagcgggccggcttgacctcgatcggcacctggtaggtggcgccgccaactcgacgggagcgcacctcgacggcgggcttcacgttctcgagggccttcttgagcgtctggaccggatcgacgccggtcttctcgcgggttccctccatcgcggtgtacacgatggactgggcaacggtcttcttgccgtcgaccaggatcttgctcacgagctggctcaccagcggcgagctgtacacggggtcaacgacaacggggcgcttgggcgcgggtcctttgcgaggcattacttctccttcttggcgccgtagcggctgcgggcctgcttgcggcccttgacaccctgggtgtccaagctgccgcgaacgatcttgtatcggacgccgggaaggtccttcacacggccgccgcgcacgagcaccatcgagtgctcctgaaggttatggccgatgccggggatatatgcagtcacctcaatgcccgagctcaagcgaacacgtgccaccttgcgcatggcggagttcggcttcttgggagtggtcgtgtagacgcgcgtgcagacaccacgacgctggggcgaacccttgagcgcgggggtcttgctctgactgaccttgtcactacggcccttgcggaccagctgctgaatggtaggcacctgctggaatctctttcgttatgtggactggatctgcttatgacgcagctctcccacccgcctcacgatgcacccagcaactgatggatctgaaaggacgattgggtcgctgccgcacgaatcctagaccgccgtgaccgcctcgcaacgaacaggagccaggtcgggagggcacgcgctttcatccgggcaaaccgaaccaagtagaaacgatacccgccgcattcaagccggtcaaacggcactctgcgggcccgtgcgcaccggtctccgaccgggccccgcttcccccgcccgctggccgcgttggggcagcccacgcgagcggggcaacacctgcggcgaaccggcggatgcccgcaggacgcacaaccgggccggagccatgacggctccgacccggttgtgtcgcaacgtacccccgaagggatcagcgtcgcgggttcagcattgcgtggatcagcgcaggtcgccgaagtccagatcgtccaacggcactgcggcgcccgaacccgacccgaagtcgtagtcgaacggatcgtagttcacctggaacgaattggccttggcctctgcggtcggctccaccctgatatcgcggtagcgctcgagcccggtacccaccgggatgagcttgccgaggatcacattctccttcagaccgaccaggtggtcggacttgccgtggatcgacgcatcggtgagcaccttggtggtctcctggaacgatgcggccgacagccacgattcggtggccagggaggccttcgtgatgcccatcagcaccggacgaccctctgccggacggccaccctcctcgactgccttgcggttggctgcctcgtaggtcttacggtcaaccagttcgccgggcatcatcggggtgtcgccggactcgatcacggtcacgcgacgcagcatctgccgaatgacgatctcgatgtgcttgtcgtggatcggtgaaccctgcgaggcgtacaccttctgcacttcctccaccaggtgctcctgcaccttgcggaggccgcgcacacgcagcacgtcctgcgggtcgatcgtgccgccggtgagctgctcacccacgccgacatgaacgccgtcggcgatcgagtggcgcacccggttcgaatcctcgaactccaggcgtgcacggcgcggcagcgcgtactcaacgtcctcgccaccgtcgtcacgcacgatcgtgagcttgcgcccgcgatcggtctcctcgatcttcacccggccatcagcctcggcgatcggcgccttgcccttcggggtacgtgcctcgaacagctcgaccacgcggggcaggccctgggtgatgtcgtcgccagccacaccgccggtgtggaaggtacgcatcgtcagctgggtgccgggctcgccaatcgactgggcagcctggataccgactgcctcgccgacctcgaccatcttgccgttggccaacgacaggccgtagcacttggcgcaggcaccggtggtggcctcacaggtgaggaccgaacgcaccttgatgctcgtgatcccagcgcggatggcattgcccaccacggtggagtcgagcatcgtgcccgcctcgatgacgaccttgccggactcatcggtggcgtcggtggccaggatgcgtccgtgcaccgaagtgtcgagcatcttggcgggaaccagcatgccgtcggcacccggctcggcgatggccttcatcaggccacgctccgtgccgcaatcctcctcgcggatgatcacgtcctgcgagacgtcgaccagtcgacgcgtcaggtaaccggagtctgcggtacgcagtgcggtatcggcctggccctttcgaccaccgtgggtggagatgaagtactccaacaccgtcaagccctcacggaagttcgacttgatcgggcgctcaatgatctcgcccttcgggttggccaccagaccacgcatggcagcgatctgacgcatctgggtcatgtttccacgagcaccggagttcaccatcatgtagatggggttggtcttcgtgaagttcttctccatggcgtcggtcagctctgccgtggcgtcattccagatctgcaccaactcaccacgacgctcctcctcggtgacagcaccgcggtcgtagagcttgtcgatcttggcagccttcttctcgtagctggccatgatctcgggcttgttcgggggcgtctgcacgtcaccgatcgagaccgtgacacccgactgggtgccccagcggaagcccatgtccttcaggttgtcgagggttgcgacaaccaccggacgcgggaaccggatggccaggtcgttgatgatggccgacaactgcttcttgccgacgtgcgaggtgacatagggatagttgtccggcagcgcctcgttgaagatcacctggcccagggtggtgtcaagcaggagcgaaccatcggcacgctgcttgtcctccaggccaaccggcgggacgaccccgctcaggcggatcttgcacttggcacgcaggtcgagctggtgcaggtcgtaggccatgacggcctcggccttcgagctgaaggcacgcccctcgcccgtcagaccgtcgaggtcctgggtgaggtagtacatgccgatgatcatctcgtggctcggcaacgcgatcggcttgccatcggcaggcttcaggatgttgttcgagctcagcatgaggatgcgggcctcggcctgtgcctcggcgctcagcggcaggtgcactgccatctggtcaccatcgaagtcggcgttgaaggccgcgcagaccagggggtgcagctggatggccttgccctcgatcagcaggggctcgaaggcctggatgccgagacggtgcagcgtcggtgcgcggttgagcagcaccggatgctcacgaatgacctcgtcgagcacgtcgaacacctgcggacgctggcgatcaaccatgcgcttggcgctcttgatgttgggcgcgtagttgaggtcgtccaggcgcttcatgacgaagggcttgaacagctccagtgccatctgcttgggcaggccacactggtgcatcttcagctgcggaccgaccacgatgaccgaacggcccgagtagtcgacgcgcttgccgagcaggttctgacggaaccggccctgcttgcccttgagcatgtcggacagtgacttgagcgggcgattgcccggaccggtcaccggacggccgcgacggccgttgtcgaacagcgaatcgacggcctcctgcagcatccgcttctcgttgttgacgatgatctcgggcgcaccgaggtcaagcagcctcttgaggcgattgttgcggttgatcacgcgacggtacaggtcgttgaggtcggaggtcgcgaaacggccaccgtcgagctgcaccatcgggcgcaggtccggcgggatgaccgggacagcgtccagcaccatgcccatcggcgagttgccggtgtcgaggaaggcggaaaccaccttgaggcgcttcagggcacgcgtcttgcgctggcccttgccggtgaggatggtctcgcgcagcgaatcggcctcggcggccagatcgaaggtctccaggcgacgcttgacagcctcggcgcccatgaagccgtcgaagtacttgccgaagcggttcttcatctcgcgatagagcacctcatcgccctcgaggtcctgcaccttgaggcccttgaagcggtcccagacggcgtcaaggcgatccagctcgcgctgtgcgcggtcgcggatggtcttgagctccttctcaccgccgtccttcaccttgcgcttggcatcggccttcgcgccctcttcttcaagcttcgcgaggtcttcctcgagcttgctcatgcgcttttccacatcggcgtcacgacgaccctcgatgtgcttgtgctcggtggcgaccttggcctccaggctcgacaggtcgcggctgcgcgcgtcctcgtcgaccctggtgatcatgtaggcggcgaagtagatgaccttctcgaggtccttcggcgcaatgtcgagcagatagcccaaccggctcggcacacccttgaagtaccagatgtgggtgaccggtgcggccagctcgatgtggcccatgcgctcacggcgcacattggaccgtgtgacctcgacgccgcagcgctcgcacacgatgcccttgaagcggacacgcttgtacttgccgcaggcgcactcccagtcacgggtggggccgaagatctgctcgccgaacaatccatcacgctcaggcttgagcgtgcggtagttgatcgtctcgggcttcttcacctcgccgtacgaccacccacggatctggtccgcggtggcgaggccgatcttgagtgtgtcgtatgtgttgacgtccagcacgttgattctctttcccctgctaccagcaggcgggtcaaaacaagtgaatgtctgttgttttgtcgtgggacgggccggggcccgacgccgctagcgcggcatcagccctcggactccaacttgtacgaatcagttccgggacgacgggacaggtcaatgcccaactcgtcgaccgtgcggtagtcatcctcggtctcgcgcagatcaatcactcccccatcggagccgagcacctcaacgttcaggcacaacgacttcatctcctggacgagcaccttgaagccctcgggaatgccgggctcggggatgttctcgcccttgacgatggcctcgtagaccttcacgcggccggccacgtcatcggacttgatggtgagcatctcctgcagggcccaggctgcgccataggcctcgagtgcccacacctccatctcgccgaagcgctggccgccgaactgggccttaccgcccaggggctgctgggtgatcatcgagtacggaccggtggaacgggcgtggatcttgtcgtcgacgaggtggtggagcttcagcatgtacatatagccaacgcccacctcctcggggaactcctcgccggtgcggccgtcgaacagcgtggtcttgccgtcgctgtcgacgatgtgatcgccgtcgcggttgggcaggccatgcgccagcaggccggtgatctcgtgctcctcggcgccgtcgaagaccggggtggccaggcggacgtcgccgtccacgtgctccagcccgacctcacgcaggtgctcggcccacggatcggtggcgtcgccgagatcccaacccgagtgggcaatccacccgaggtgcatctcgagcacctggcccaggttcatgcgcgagggcacgcccagcgggttcagcatgatgtccaccggagtgccatcggccatgaacggcatgtcctcgatcggcaggatccgggagatgacgcccttgttgccgtggcgaccggcgagcttgtcgcccacctgcaccttgcgcttctgcgcaacgtagacgcgcaccatctggttgacgccgggaggaagctcgtcgttctcctcacgatcgaagatgcgcacgccaatgacggtgccctcctcgccgtgcggaaccttcatggacgtgtcgcgcacctcgcgggccttctcgccgaagatcgcgcgcagcagtcgctcctcaggggtgagctcggtctcgcccttgggcgtgaccttgccgaccaggatgtcgccggggcggacctcggcgccgatgcgcacgatgccacgatcgtcaaggctggcgatcatgtcgtcggagacgttcgggatgtcgtgggtgatctcctcaggccccagcttggtgtcgcgggcatcgacctcgtactcctcgatgtggatcgaggtgaggatgtcctcgctcacgacgcgctgggagatgatgatcgcgtcctcgtagttcaggccacgccagggcatgaacgcgcacagcaggttgcgtcccagggccagctcgccctggtcggtgcaggggccgtcggccagcggggtgccggcctcgacgtgctgtcccggagtgacgatcgggcgctggttgacgcaggtgccggcgttcgaacgctggaacttctccagcttgaacgtctggtacgtgccgtcatcgcaggcgatgtcgatgaggtcgccggtgacaccggtgacggtgccgggcttggacgcaagcgtcacctcgccgacgtcgacagcggcgcggtactccatgccggtgccgacatagggcgactcattgcgcaccagcggaacggcctggcgctgcatgttcgcacccatcagggctcgcgaggagtcatcgtgctcgaggaacgggatgagggccgaaccgaccgacaccatctggcgggccgagacgtcgatgtagtccacctcgtcggcgggcaccaggtcgacgtcaccgtggctcacgcgcaccagcacgcgatcctcggtgagctcgcccttgtcgttcatcgtggcgttggcctgggcgatgacgaagcggtcctcctcatcggcggtcaggtagtcgatgtggtcggtgaccaagcccttgtccaccttgcggtaaggggtctcgatgaaaccgaaggcattgaccctggcgaaggatgccagcgaaccgatcaggccgatgttcgggccctcaggggtctcgatggggcacatgcggccgtagtggctggggtgcacatctcgcacttccatgccggcgcggtcgcgcgacaggccaccggggcccacggccgagaggcgacgcttgtgcgtcagctcggcgagcgggttgttctggtccatgaactgcgagagctggctggtgccgaagaactccttgagcgccgcggtgaccggacgcacattgatcagggtctggggcgtgatggcctcgatgtcctgggtggtcatgcgatcacgcacgacgcgctccatgcggcccaggccggtacgcagctggttctggatcagctcgcccaccgtgcgcacccggcgattgccgaagtggtcgatgtcatcgggctcgacgggcaggccatcagccagctcggtcttgccctcgtgcagcgcacagatgtagtggatcgcggccacgatgtcgtccatcgtgagcacctgctggtcgtagggcaggctcaggccgagcttcttgttgatcttgtagcggccaaccttggcggtgtcatagcgcttcgggttgaagtagaagttgtccagcagcgtctgggcagcatcgcgcgccgggggctcgcccggacgcagcttgcggtagatgtcgagcagggcctcgtcctgggtggtgacgtggtccttctccatggtcatgcggatcgactcgtactcgccgaactcctcgaggatgcgctcctcggtccagccgagtgccttgagcagcacggtgacattctgcttgcgcttgcggtcgaggcgcacgcccacggtgtcgcgcttgtcgatctcgaactcgagccaggcaccgcggctggggatcaccttgcaggtgaagatgtccttgtcgctggtcttgtcgggggtctgctcgaagtagacgcccggcgaacgcaccagctgcgagacgacgacgcgctcggtgccggtgatgatgaaggtgcccttgtcggtcatcagcgggaaatcgccgatgaacacggtctggctcttgatctcgccggtgtcattgttcatgaactcggcggtgacgaacagcggagcggcataggtcgcgtcgcgatccttgcactcctcaatggtgtacttgggttcctcgaagcggtggtccctgaagctcagggacatcgtctgggagaagtcctcgatcggggagatctcctcgaagatctcctccagtccggacttggtgttgacgtcggtgcgaccctccgagagggcctgatccacctcgttctgccagttctcgttgccgacgagccagttgaacgatttcacctgcagatccagcaggttggggattcccagaggttcacggatcttcgcgaacgagatccgtcctgtggtggagacgacatcggagttgttcaacgcagtgcgcgaggcggccaagatgtggtccttccaagaactcgcaaaaggttctttgcatgcaaaacggcccgtgtcaacacgggtcaactatgtggagataggcaaaagccaactgtacacactacaggagggcaacacaagccggcgaccgccaaacgcggtcacctcgtgcgctccgtcagtccagcgacgccgttgtcactgcaccatcatgcgaaccacaccgaagatgatacgcaacacgccggcgatagcaattcaccgggccgactcgcgcgtggcgattcatcgtgggcacatcgccgccggccgcgcagggccctcccccgcgggccaccgtggctcagcgcgggtggagctgcagggggtcgcagcggtcgggcggggcagacccgaactggtcggagcaccagttgcgcacatcgtcggcggtggagaaggtgcccgagacgatgatcacgaacgtgaagcggtcgtcgaccaccggcgggttgtaggtggaacgacgcagtaggcgcacttcacggccggcaccggggtcgttcttctgggctgattcgaagcgggccagagcagcaggggccccactgggcgatgcgcttccactgggggtcggggtcggctggctgggcggcaccaccaccgaggagccgagctcggcgacccattggttggtcagtggctgggtggccgtccagccctggtcggacagccggacgagttcggagtaggcccgtgaatcggtggacacggcgttggaactcgacgaagccgccgtggggaccccggtgctgggcagggccgtgttccaggttcccgcgcgcgagccgggctgattggtgttcttggaggtcatcacattgaccacggtcatcaccgccacgaccagcaccgccaccccgatggccaccagtcgcacgctcgtggacaggccgggaatgatcctgcgccaccagtgtcgtcgtgccatgcgcgggacttcccccttcatcactcgtcgtctgcgtgccaactcccatggtgccccatcgcagccgtgccgcaagtcgtctgtggacgagcggcgcgaccgggaggcagccgggccccggaaaagccagtggttgccggaagaacaggaggtgccggacaagacagtaggggtggggcaacgagttgccccacccctactggtggatcaatgctcaacgcgtccggaccagtggcccggttgcgtcaccgcatcagtcaggtgactgggtcacttgaaggaaacggtggcgccggcgccctcgagcttctccttggcgtcgttcgcggtgtccttgttgaccttttccaggacaatcttcggagcgctctcgacgaggtccttggcatccttgaggccgaggctggtgagcgcgcggacctccttgatgacctggatcttcttggaggagtcgatcgagtcgagaacgacgtcgacctcggcgttggcgtcgtcagcagcgccctcgccttcgccagcgccggctgccggagcagcggcgacggccaccggagcggcggccttcacgtcaaaggcatcctcgaatgccttcacgaaatcggacagttcgatgagagtcatgtccttgaactggtcaaggagctcttcagtgctcagcttcgccatgatggggcgtccttccttattcgttcgatgcagcgtcagctgcgtctgctgattcctcagcagcgcttgctgcctcgggtgccgattcctcggcggtgtcttgcttctggtcggcggcgggggttccggccccaccgatgactgagggatctccctgcgccttgctctccagggcgcccatgaggcgggcagcctggctcagcggtgcagcgaatgtggccacggcattgctcatggacgccttcatggcacttgccagcttggcgagcagttcctcgcgcgaaccaatgtcggcgagcttggtgaccgtttcggcgtcgaggatttgtccatccatgacgccgcccttgatgaccagaagcgggttggcctttgcgaagtcacgcagacccttcgccaccgtggcgatgtcacctgagataaaggcgacagccgtcgggccggtgagctggtcgtcgagtccttcgacgccagcctccttggcagcgagcttggtcagagtgttcttcacaacggcgtaactggcgttgtccccgagcgatctgcgtagatcctgcagatcctgcacggagagtccgcggtactcggtcagcactgtggcgttgctctcggtgaacttctccgtgagctccgcaacggccgctgccttgtcaggcctcgccattgggtctccttcccacttctcgtacaagtgaaatctcgtacgcgtcgaagaccctggtaggtccgcccatcatcgggtgcgatacccggacaagaaaaaatccccggcgcgctggcgtccggggagggctgggcgtgaacccaaacctgtgtcggtcacctacgctggcgctctctcgagcttgtggtcgaaaccaccggcggtcttcggcttggacaactctagggcgcttatcgccgtagagcaaacgagcacagcagggcgcttgccgccgtagagcaaacgaacacagcagggcgcttgccgccccggggcaaacgaacagggcacgacgcctgccgccgtgccctgcccgtgcctggtggttgctatgcctcggcagcctgcgcggcggcctcgcgtccactcatggcctggcggtagagcttgccggcccggtagctggaacgcaccagcgggccgctcatcacgcccatgaagccgatctggtcggccagcttgccgaattcgacgaactgctggggggtcacccagcggtccacggggcgcagcgtgacattgggacgcaggtactgggtgatcgtcaccagttcggcaccggcgtcgtggatgtcctgcagggcccgggccacctcgtcgtcggtctcgcccatgccgaggatgaggttcgacttggagatgacgccggcctcatgggccatcgtcagcacctgcagcgagcggtcgtagtcgaatccgggacggatctgcttgaacaggcgcggcacggtctccacgttgtggccgaacacctccggggccgcctcgaacacctggtcgagcagttcctgcttggcggagaagtcctgggcgagcatctcgacacccacgccggggttctggctgtgcacctggcggatggtctcggcgcacagccaggcaccctcgtcgggcaggtcatcgcggcagacgctggtgatcgtggcatagcgcaggccgagctgcttcaccgactcccccacgcggcggggctcgtcacggtcgtaaccggtgggacgtgccgactcgatctggcagaagtcgcaacgacgcgtgcagtgctcaccaccgatcaggaaggtggcctcccggtcttcccagcattcgaagatattgggacacccggcctcctggcagacggtgtgcaggccctcaccaccggtgcgctcgcgcacatcgaggtattcggggcccatggacagccgcgtccgcagccaggcgggacgtcccttctcgatgggcgtctgggagttcttcttctcgatgcgcagcaggcgtctgccctgtgctggtgtggtcatagccggatctccttgacgacattgggctggggctggtgatggtcggcggcgggatggtccgcggtcgggtgatggaaggccgcgtgctgggtgcgcggcacgtcgggcgacatctggtagggggcgaacgacatcatctcggtgagatggggcgtcaggtcatcggccacctgcgacagggagggcgcccggcccagttcgcggcggatcgaggtgacgtcggcgtcgtcgatcccgcagggcacgatgttgtcgaagcgatcgaaggcagggtcaacgttgagcgcgaagccgtgcatggtggtctggtgggcgcagcgcaccccgatggcacagatcttgcgttcaggacggatgccgtcggaggcgagccacacgccggtgcgtccgggaatgcggcccgtcgcgatgccgtactgggcgagcaggcggatcaccgcctcctcgacgcgtcgcacatagtccacgacgcccacgccgcgctgcaggaagatgatcggatagccgaccagctggccgggaccgtgccaggtgatgcgcccgccgcggtcgacgtcgaccaccggcgtgccgtcgaagggacggtcctcgggctgggtctggcgtccggcggtgtacaccgattcgtgctgcacgtacaggacgcggttggggctgcggtggtgggcgacggcgtcaaggatctcgcgctggtgctcccacccggtctcgtagtcgtagagggcgccgggggccgcgtccaggcaatggcgctcgtagtccagtccggcgggatgggtcacccagttcggcggcaggacgccattgaccgcctggggcgttgtgggttgcaccgttgcttcctcgcgctgatctgtcacggcgaccatgctaaccgccccgtgtgccgcaacgcggaccgccgtgtcaccgggtggaatgcgttctccgcgggcgaagcctgccatcttgggctcgggcgaagccccacgcacaagggccggggccggccccacccgaaggtggcaccggccccggccctatcagtgctgctggatcaggaagagacctcgctggcgggacgtgccgccaccggatcaacctgaacgcccgggcccatcgtcgtggacacggtgatcttcttcacatagcgacccttggaggtgctgggacgaagacggtagacctcatcagcggcggcccggaagttctgctccagggcgtcggtggtgaagctcagcttgccgacgatgaactgcaggttcgagtggcgatcaacgcggaactcgatcttgccgcccttgatgtcggagacggccttggtgacatccatggtcacggtgccggtcttcgggttgggcatgaggccgcgggggccgagcacgcggcccagacgaccaaccttgcccatcaggtcgggcgtggcgacgacggcgtcgaagtcaaggtagccgtcgttgacgcgtgcgatgagatcatcgccgcccacctcatcggcacccgcttcgagggcctcggtggccttggcgccctgggcgaagacgaggacccgcgccgtcttgccagtgccattgggcaggttgatggtgccacgcaccatctgatccgccttgcggggatcaacaccgaggcgcatcgacacctcgacggtctcgtcgaacttgccgggcgtgtactgcttgatgatggccagtgcctcatcgggcgtgtacagctgctcagggtcactgagcgcagcatctgccctgtagcgcttggagtgcttcatatctggttccttcctttcagcctcgcgggctgattcaccagttcctggttcgggcgcacgaccctgccagttgtcgggtgctggcccccggatgcaggatccgttgccagcggggatcgctacttgacggtgacgcccatggagcgggcggttcctgcaacgatcttcatggcctgctcgacgctgttcgcgttgaggtcgggcatcttggtctcagcgatctcacgcacctggtcagaggtgatggtgccgaccttttccttgtccggctgaccggaacccttctgcacgccggccgccttcttgatgagctcggccgccggaggcgtcttggtgatgaagtcaaaggtccggtcttcgtagatcgtgatctcggccggaacgatggttccacgctgggcttccgtcttggcgttgtatgccttgacgaactccatgatgttgacaccatgcggtccgagggcggtgccgacgggaggcgcaggggtcgcggaaccagctgcgatggcgatcttgacgaccgccgctaccttcttcttaggaggcatgttgggtccttcttcacattgctggttgcccggcgcacgctgcagggacgatgtgccggaattcagaggggcgccctgacgcccgaccccgaggggtcatgcagatcttctagtcgatgaccttttggatctgcgggaaggtcaagtctaccggggtctcgcgacccaggatctcgacatcggccttcaagcgttggttgtgcgtattgatctcggtgatggtggcgtgcaccccggcgaagggtccgtcgatcaccatgacctggtcgcccacggcgtagtcgacgacctcgaccttctcctggtcggcgccggccttcgcctcgccggacgcgaccacctgggcggtgaccgacggggtgagcatgtgctcgacctccgacaggtccagcggcgcgggggtctggccctggccgacgaagccggtcaccgacggggtgtggcgcaccgtcgaccagctctcatcggtcatctccatgcgcaccagcacgtagccgggcatgaacacgcgggtgaccttcttgcgctgtcccttgcgcatctcgacggcgtcctcggtgggcacgaccgtctcgtagatgtagtcctccatgttgagggacttcacacgattgtcgatgttctgcttgacgcggttctccatgcccgaataggtgtgcaccacgtaccactcaccgggcttgaccaccagatcgtcgtgcagctcctccagggccttggcgacggcctcgtcctcctgggagggggcctcctcgtcgggcttctcggcgtcctgatcggccgcgggctcggccttgtcggcctcaccctcctcggtgggcagtgggccgaggttcagctcggcaccggacttggcatcgtcgtcgctgaagtcagcgaagtccaggttgatgccggtatcggtatcaccctggtcgtcgttggatccgagattgagctcggtctcctcgaggggcttgttgtcgccctcgtcgggagtctgcgtcacgtctgtcttcctcctagtatcagccgaacagccacagcaggagccgggtgagtccgaagtccagtccggccacgacggccatgatgaacagcacgaaaacaaggacgacaacgaaatactggccggtctgctcgccggtgggccacacgaccttcttgagctcgcccaccgactgcttggtgaatgtaatggggccggcgcgcttgtggcccttcttggcctgggccggcttgcccgccttcgcacgggcaccgccggccttgcgcaccgggctggtgctgtgcttgcggacgatcggcgtgggcttctcgtccttcgcctcatcggcgcgacgctccgcctcgtccagctgcgactcgtcgtcgatccggacgtcgtcggggtcacccttgtcgggcgtcgaatccaccgtgtcgtcggcgttggtcagctcttcggcatcggcgtcatcgatcactgccggatcgggttcgccattggcctcgggcagcatggaaccgggcaggtcatctgcctccatgtgctcaccggtcgagcggtggcgcttcacagggccggactgggcctgctcagcgcgacgttttgcgcgctcgctccggtctgccacgaattgcccttcatcgacgttgaggggcgtccgggtgggcgcccctgatggatggaccccaccgaaccggaggaaccggaacggcaagccctgtgatcatgcatggaattggtccaccagaagcgagcctagtcggctgcatctgcgaatcacggatcccgtgctatcgcagggcacgagggactcgaacccccaacctgcggttttggagaccgctgctctgccagttgagctagtgcccttcggcgctgtgacgagcagcgcattacgcggctcaccgacaccgtcaaccagaggagtctagcgaatcaccgcccgcagtgcgaactcgtacccatcggccgcagacccgtcggtcggggtggggccgggcggcaggacggacaggcagggcgctccggggcctggcaggtggtcatgcggccgtccgattcagctggccgcgcactccaggtgggtcacggtggcccgggcataggggtcggagtccttgatggtgcagtgctgccagccgggcgctggggcggcgtccaggctcacccagcgcaccgatcccgtcaggcccgccccggtcaggttgccgccggcctgcgccgcggacgcgggggcactggcccagggctcatggccggcaacgaggaagacccgcggggaggaagccgtcaactggtcacgggcctcctgccacaggcgttggtcgcccatggccagcgcgatggccccggtgaggccggggccggactcctcgtcgaccgccacgacgtcaccgggtgtggtggtgagcatcaggtcgcgggccagcggcgggtttccgtcggcattgcgccagctgggcttgacctgcgagtagctgcgccagccgaagatgcccagggcagcggccaacagcagcacgaccagcgactgcatgttcaccccgcgccactgtccggccgcgcagcccaacagcagcgcggctcccagtgtggtggcgcccagcacctggtcgggaggcgttgcccgccccgtcagggccagcagcaggtcagcgccgggctgggcgatgaccatcaggacggccagtcccaggccggtgtcgaagaaggcattgccgtgcgtgttgacgatggcgatgatgatgatcagcgcggcggcgccgagcatcacccgtccgggaaagccgccggaggcgtccaggagcaggcgtcccacggcccgcagttgcgcagagccgtcctgcgggcccggcgcaaccgtgtagcccgcatgtccgttggcccagatgagcaccgcgatggccgcacccgccagccaaccgggcaccagctggcgccagccctcccccgagggacgcatggttgccgcatagaacaggtgggccacgagcacgggggccaacgtcagatcgcacaccaccatggccgcgagcagcagtccgtagacgatggccggccccaggccaaggtcctggtagctctcgaggcgggccaccagcagccaactggccaacgcgagcagggccagcccgagcatttcgccccgcgccgacagggccagcgtgacgatggccggattggccaccaggaagccaccggcgaccagtgctcccccggtgccccacagccgacccgccgtggcggcaagggcaaagaccatcaccgcagcacagaccagcgagaaggtacgggccgccgtcagggcgtcgggcccggatcccatcgggaccaggcacagccaataggcgaaccaggaacggtcggcatgggcggtcgccgtccagagtccgccgacgcccagctgggcgtgcagcaggctcgaggcctcctcatgggtggccggcgagacggcacgctggcgccaccacagcacgacgaacagggccgtgaccagggcactggtgccccactcgaggagccgggagcttgcacgagtcgccacggcgcgagcctaccggggcgcctagaggctgagttccaccagcacgggctccggcaccagggtgatcccgaaggcctggtgcaccccctcgcggatctgacgggccagcgccaccacgtcggcggcagtggcctgcccacgattggtcagtgccagggtgtgcttgcccgacaacgtggccgcgccctctccgaatcccttgtggaacccggcatggtcgatgagccaggccgcggaggtcttgaccattccaccgcccgcgtcgaagcggggcgtgtcctcgggcaggccggcagccacctggctggtgacgatcgggttggtgaagaacgatccggccgaccaggtgtcatggtcatccggatcgatgaccatgcccttgctgcggcgcagggccagcacctcgtcgcgcaccttctgcgccggcgcatgctcgcccacctcgatgccgaggcgatgggcgagttccgcgtagcggatgggcatcgacatattgcccagcaggaactgcagggtgacctcgagcaccacatagcgtccggtcggcgaacccggcaggcgactctgcttgaagatcgaattgcggtacgagaacttgcagtccgcattggcgaaggtgcggtagctcttctcctgacggtcccaggtgcgcacccggtagaccagttcgccgacctcggccccataggccccgacgttctggatcaccgtggagccgaccatgccggggatcccggacagcgcctcgacaccgcgccactcgcgcgaaatggccagctggacgaagtcatcccagttctcgccggccgcaatgttcatcacggcgcccccgcagccggagatctcgccctccacgccgcgcgtggcgatctgcaggacggtgccgtcgaagccgtcatcggacaccagcatgttggaaccgcccgagagcaccagcaggggctcgccggcctcgtcggcacgcttcacctcgtcgagcacctcggcctcggtacgggccaccacgaagcgcttggccctgcccccgatatggaagctggtgtggtcggccagcacgggcgaatcggagatctcgcgctccggaaggatgcccgatgtggggtcgagctcgcaggaatcgaagaggtcgtagtcctcttcatcggcgatactcatgtgctgcctcctgatgaacgactgctgttggaatggggagccggcgaaatcgcgtgcccccgacgtgcctcacaggcggatgtgggccctggcgttgccgagcaccttcaccggcttgccctcgtggtcgatgcgcacgtccaccgccaccgtggcgacgcccgcctccaccccggtgaccgacgcgctgacctgcacctgcacgccccggtcgtcatcgggcacctgcaccggacgggtgaagcgcacctggtagtcgagcacgcggcgggggtcggcacaccaatcggtgatgatgcgcagggaggcccccatcgtccacatgccgtgggcaagcacgccgggcaacccgagctcacgggccttgcagtcgctccagtggatgggattgaagtcggtggacgctccggcgtagcgcacgatgccgccacgggtgatcgtgagcgtcaggggcggcaggacgtcgccggcacgcaccgctgccgggtcgaaggcgctcattcggcggcctcgcgggtgttgagcagggtggacgtcgcggtgcacaggtgctcgccgtccacggtgtcgagcttcaccgcgatggtcaccatgtcggtgaggccacggttgtggaccttcgtgatcgtcagggtggccgtcacgtcgtcgccctcgcgcatcagccgctcgatgtcgaagcgctgatcggcatgcaccgtgcgctgcagggacagcccgaggtcgggatcatcgaacatcgcaccccacgcggaggccgcgatcacggcggcgaaggtgggcggtgcggtgaagggggtgtcatcgtcggccaggtaggccgggttcgggtcgcccagcgacttcacgaactccaggatcttggcgcgactcacgcgatagggcgcggttgacggataggtccgtccgacatgttcaggtccaataggcacgagtcaaaactactagggaccgccgagagcggcgcacgactactaagggaccgccggggacggcgcacggccagcgagggccccacgaaatggatcaggccgccaagtcaatgacttggcggcctgatcggtagttctgaagcttgctcagcgggtctcgcggtgcagggtgtgcctgccatccctggggcagaacttgctcagctcaagacgatccggcgtattgcggcggttcttcttggtgatgtagttccgctccttgcacacggtgcaggcaagcgtgatcttgggacgaacgtcccctgccttcttggccattgtcgatccttctcgtcttgccgaaattccgccgcgtttggcggagcacggtcacccttcaatactaggtcgggcacccaatcaccgatcacggccacgcgatccgggcttgtcgtgcctcagccttcggtagcgggagcgggactcgaacccgcgacacagcgattatgagccgcttgctctaccgcctgagctatcccgcccctgtgagcggtctcccgtccacaaacttgccgcaacccggactcgatcacgcggtatgtgatcgaaggccgcaacagagcccccatgcggaatcgaaccgcagaccttctccttaccatggagacgctctaccgactgagctataggggccagccgacgcgcaacactaccggatttgcgcgccggttctcaaatcagcgtgccatcgccgcctgcggctcgcccttccgggcgtcctgcgagcccgtcgtggacgccgcatcggagcccttcggagccgccgtggactgctcgcggatcaaggattcccaggccgacagcccggcgatcgcaccggcaccctcagccacgatgatctgcttgaagggaacgtcggtgcagtcaccggccgcgaagacgcgcggcacattggtggcaccccgatcgtcgatgacgatctggccatgcgcgtcgagcttcacggcgcccttcaaccaatcggtattgggcatgagcccgatctgcacgaagacgccgtccagggcgagctcacggtgctcaccggtggccctgtcgtcgtagtgcaggccggtgacctgtgatccgtcacccaccacctcggtgaccgccgaattggtgagcacggtgatgttggtggtctggtcgacgcggtcaaggagcacctcgtcggccttgcaatcgggcatgaactcgaccacggtgacgtggcgggcaacgccggccagatcgagggcggcctcaatgcccgagttcccgccgccgatgacggcgacgtccttgcccttgaacagcggaccgtcgcagtgcgggcagtaggtgacgcccttgttgcggtactcctgctcgccgggaacccccatctggcgccagtgtgcgcccgtggcgagcaccaccgcatcggcggacaactgcgcatcgccctccaggcgcacccgcaccaggtcgtcgccgtccgtggcggggagcagctcggaggcccggaccccgtcgatcatgtcgatctcgtactgggaggcgtgggtgcgcaggtcggaggccagtttggggccctcggtgtgcggcaccgagatcacgttctcgatggacagcgtgtcattgacctggccaccgaagcgatcaccgatcagggcggtgcggatgcccttgcgggccaggtagatcgccgaggcgacgccggccgggccctggcccaccacgagcacctgatagggcttgcgggacgacagctcggcggccatggaggcgccggcgtcggaatccatgcccgacaggatctgcgcggcctccatgcgtccctggccgaagagctcgccgttgaggtacatcgtgggcgtggccttgatcttctcggcctccacctcgtcacggaacagcgagccatcgacgaccgtgttggtgatcagcgggttgagcacggccatcgcattgatggcctgcaccacggtggggcagttctgacaggtcagcgaaatgtaggtgacgaagttcttcggggtggtgatcgccctggcacccgccaccaccttctcgtcgagcttcaccgggttgccacccacctgcagcagcgccagcacgaacgagttgaactcgtggccggtgggcagggcggcgaaggtgatcgagatgtcggagcccggacgggtgatcgagaaggccgggcggcggtcgtgggcggagtcgtcacggcgcacggtgatgttcgctgacagtgcggcgacctgctccagcatgtcggagatctgcgctgattcggggcggtcgtcgaggctcatcaccagctcgaccggatgggtgacccggtccatgagctggttgagctgggagatgagggctgcgtcaagaactgccatgtcgtcctttgggttgaatgcgatgaatggtccggggagacgcattcgacgagggacccgcccagcaggaactgaaccccaccaggagcgggcccggcaggaatgagggcgtgtcgcaccggattttctggtgcgacacgcccgcgtcattcactgtggtcgggacgccgaatgcgtcagggcgctcacgagcgccgcggtgacttgcgatgtggtgatcgactcagatctggccgacgaggtcgaggctgggggtcagcgtgtcgccggtctcatcccagtgtgcggggcagacctgatcggggtgctggcgcacgtactgcgcagcgcgcaccttgcgcaccagttcgctggcgtcgcggccgacaccgtcggcgctgacctccacgagctggatcacgccatcgggatcgatgaggaaggtgccgcgatcggccaggccctggccctcgcgcagcacctggaagttggtggcgagctgaccgctcggatcgccgagcatgacgtactgcaccttcttgacttcctcggactccttgtgccatgcggcatggacgaagtgggtgtcggtcgaggccgagtagatctccacgcccatcttctggaactggtcgtagtggtccgcaaggtcaccgagctcggtgggacagacgaacgagaagtcggccgggtagaagaagatcaccgaccacttgcccttgaggtcctcgtcggttacgtcgacgaactccccctgatggaacgcgctggccttgaacggcagaatctgggtgcccacgagcgacactttcacttacctcctgtagtcggcattccgacttggttcgatggttgcttccaccaagtacaagtgggctccatcagccgatattcccgaggtctcatcagttgggaagatcgggaggttctgtctcggcacgtgggaaacgggtcgccgtgggcgtcgggtgaggcggcagaggggttcacggtgtgatctgtgggccatcggcgcgggatcatcagcgcgtcgtcatcggcacgcgggaccggcgctggaaaaggcggggacgacgggcgcccggaaagcgaagaagccctgcacccatccggtgtaaggcttcttcaactcggggcgcccgccccgagagtggcaggtgaaggattcgaaccttcgaaggactacgccgacggttttacagaccgctcccattggccgctcgggcaacctgccatgcgtcgcagaacactaccagtgatcgccgagcacgtaaaaatcacggctcggtgggggcccggggccagtggggaacacgaccccctcgggcacctcagcggacgggtcggcgggcgtccttgcgggtggtcagcggacgcggcggcatgaaggtgaacgcgcaggcgacgacggtgaccaacaggctgatcgccgcccaactccagctgtaggcctggtcggccaggccctgcatctgggtgctggaaatgccgatcagcccgtagacgacctgcacgccggcatcggccaggaacagcagggccccgacgcgcgaggtgccccgatcgcgcaccacggccacgaacgcgcacaacaccgcgaggaggcccacgacgacgcacgccagcccgagcagcagcaggctggcctcggcggcatcggcattggaccggtggacggcccgcaccacgacgggcccgacgatcagcgccaccacgacgagcacggccagtgtggccgccaacttcgatgcccaggtgcggcgcaccggtccgtcggcatggaagacctgcggttcacgagccatgcccccagtgtggcgcagcactctgggcgcaacctttgaccgaccacgtccgggtcgtcgccgcgggtggccggccgcccgacggttagggtggtcggcgtgcttcgactggccacctacaacgtcaatggcatccgtgccgcccaacgcaggggcttcgcgggctggaagcaacgctgcctgcccgacgtcgcctgcctgcaggaggtgcgctgcccctatgaggcgctcccgatggaggccttcgccggcttccacgtggcctatgacgccggtgagctgaagggccgcaacggcgtggcggtgctgagccgcacgcccttcgacgccgtgcgggtgtggagcgaccaggcgatgttcatctcgcctgcaggagacgcgcggatggccggggccgacgagctgtcggtgccggactatccgctggcccgcccgctgcgctcgttcaaccatgagggacgctatgtggaggtcgacctggccgaccagccgctgacggtggcctgcgtctatgtgccgaagggcgattcgctgttggcgccgggcatccgcagtcgcgatccgctgaccgacgaacaactggccggcgtgcagcggcgctatgaccgcaagatggccttcctggccggcttctcgcgtcacctcacccgggcgcgccgcgccgcccatgccgccggacgcgagttcctcgtggtgggcgacttcaacatcgcgcacacccggctggacgtgaagaactggcgcccggcacagaaggcgtccgggttcctgccggaggagcgggcctggttgagcgaacaactctcgccgcgcacgctcgtggacgtggtgcgcgccgcccaccccgatcaggacggcccctattcatggtggagctggatggggcaggccttcgcccgcgataccggttggcgcatcgactaccacctggcgagcccacagctggcccgcaggagtgcccgcgccttcgtggatcgcgaccacggcgccgacgaacgcgtcagcgaccacgccgccgtggtcgtggactacgacctctgagtgcgtcccatggcgatccggtgccgctgggcgggccgctgattgaacgggcccggggtcacgttcgccgaaccgtccggaagcccttgaggctccacagcagcgtcaccacgcaggcgaggaacaccagggttgtcaggaaccgcgccgtggtggggtagttcggggacacaatgatctgggccaccgtgcagaaggcgaagaaccggacgagggtcactgcccagccccgacgttgcaggattcctatcagcagtgccaggtagatgagcgtctggccgatgaaccccacgagctcccgggcagatatcccgtcgcggacaagacccacggcgctccagccgacgccaatcacacccagggtcgtcgtgatgagcacggcgagcctctcacggttggtgaacgtcaacgtcgtggaagtcgctgcttgctgaaggttggccacgatgcctccctggtcgacacggtgctgttgagtgacacgggttggttgacccagccctgccggctgacatgtcgagattaaccattggcgcgtcccgccggggagcccgggaacaatagcgatgaaatccgcctgctcggggtcctgccccccgatcggacggctctcaggaggttgcggggagctccaggtgcgtggcatggcccggatggcgggtcaccctgaccgacgcctggtggatccacgtcatgaacaccgaggcggcgaccgcggcgacgccgatggccacgccgtcattgcgccaggccatgtcgacggcgtcgtagcacagcagcgccaggttcacccagatggccacggccaccaggcgtcgacgcggctgggccaggggcagcgtcaggccgccccacagcatgtaccaactgtgcagtgcggggctggcgatggccaccacgaggtaaccccaggagatgaaggtggcgggccgcttgcgggcgatcgtcacggcgcccagcgcgagcaccacggcccccacggccaggaagacggtctgggtgatactgatgcccaacttggccgtgggatcggcaccgaacaggttcatcacccactgcacgccattgccgacgatgctcgccggcgccggggagcccacgctgccgggcacgctgacggcgttgtaccacccgaagtcgagcccggtggcgatgctgatcccggcgaagaccgcaatggacaccgcgaagctggtgagcacccgggtgacggtgatggcggtctgccccaccttgaggctgccccaacgccgtgccagcatcggcaccacataggcggccaggaaggcgggctgcttgatcgtcgcccccacgccgatgatcgctgcgccggccagccaccaccagcccccggcagcccacgaccgcgacgaataccgtcgtccgccgggaatggtggccagccacaggccgaagaccaccagtcccatcatgagcgagtcattgtgggccccgcccacgaagtcaatgatcaacagcgggttgagcacgccgaaccatgcggtgaaggccgggtcgcaacccacccggcgcgccaaccgcggcaggaagatgccgatcagcaccaccccgagcaacgcgggcacgcgttgggccaccgccgaccaataggggtcgaagccgcacacgtgcagcagcaggtgcgagatctgcatggccaggggcccatagggactcggcgtgtcacgccacacccaggcgacctggtcggcgaagccgccgggcagcacgcccggccccgagtaatagggactgatcccgttgtgcaccagccagccctgcgcagcataggaataggcgtcatggctgaagatcggcggggccgccaggaagggcaggctccaccaggccagcaccgcccagtgcttgagcgtcagatatgccgccgggcccgttgcgtcgccgggcgcaccgcccctcgccccgggccgcaaccggtaccaggcactcatgatcagcagcagaccggccatcgtcgcagcggtgccgatcagcttcgagggcaatccctccgcccgacgcgcggacaaccacgtccaccacggcgaactgcgcggcagataggcggggctcagggcgccgatggcgatcagcagggtgccgtacaggccacggcgcaccacccgcacgcgcagggcgtcggcaagatcacgccagcagtttgccaaccaggcaactgcgcgggacccctcgacgaccatgctcacagcgtatcggtcaaccctgtcgggcccggttttcgacattagtgtggagggcggccccgatgaggggaccagccggccaatggtccgacccggccgggcaccatcgcggacaccacgatggacctaccagccgggatccgacaccgaatgcgtcaaggagcagatgtgaacccggggcagcagacaccacagcgccagcgactcaatcgggtggtgattcgtttcgccggcgactcgggtgatggcatgcagctcaccggcgaccggttcggcgccgaatcagcagaacacggcaacgacatcgccaccctgcccgactatcccgccgagatccgggctccccagggcacgatcgccggcgtcagcagcttccagatccaattcgccgacgaggacatcgtgacccccggcgagcacgtcgacgtgctggtggccatgaaccccgcggcgctgcgggcgaacctggccgatgtggtgcgcggcgggctggtgatcgtcgacaagcactcgttcgccaagcgggccctcgagaaggccggttaccaggccgatccgctcaccgacggctccctggagggctaccagctggtcgaggtggacatcaccacgctgaccgccaccgccgtgtcggccttcgagaccagccggcgcggtgccgcccgcagccgcaatatgttcgccctcggattggtcagctggctgtacggacgtcccaccgaggacaccgtgcactggctgggcgagaccttcgcctcacgtcccagcgtgcgcgacgccaatatcgccgcgctgcgtgccggcgagaactatggcgagaacaccgagcagttcgcggtgcgctacgaggtgccgccggcgccggtgccggccgggcgctaccgccgcatcaccggcaacctggccaccgcctacgggctcatggtcggcgccgcccgggccgggatgacgctgttcgtcggctcgtatccgatcacgccggcctccgacatcctgcacgagctgtcgaagcgcaaggcattcggcgtgatcaccgtgcaggccgaggacgagatcgccggcatcggtgccgcactgggcgcctcccttggcggagcactgggcgtcaccaccacctccggccccggcttcgcgctgaagcaggagatgatcaacctggcggtgatgaccgagctgccgctggtgatcgtcgacgtgcagcgctccggcccgtccaccggcatgcccaccaagaccgagcagggagacctgctccaggcgttgtggggacgcaacggggaatcacccctgccggtgttcgcccccagttccccgtccgactgcttccaagtgaccgtggacgcctgccgcgccgcggtggagaaccgcaccccggtggtgctgctcaccgatgccttcctggccaacggcgccgagccctggcaggtgcccgacctttcccagatcgcaccgatcgacccgcacttcgccaccggacccaacggcttcgacgagaagggcaagcccaccttcctgccctacaagcgcgacccgcagaccctcgcccgcgactgggcgctgcccggcaccgtgggcgccgaacaccgcctcggcggcctggagaagtcggttgaggcgggcacggtgagctacgacccggccaaccacgagcagatggtgcacacccgcgccgagcgcgtcgcacgcatcccggtgcccgacgcgctggtcgacgaccccgaaggcgaggccgacctgctggtggtgggttggggctcctcgtggggcccgatcaccgccgccgtgcgcgacctgcgcgctgccggacgccacgtcgcccaggtgcagttgcgcacgctgaacccgttgccggccaacctcgaccaggtgctgcaccgctatcgccgcgtcatcgcccccgaggtgaacctcggccagctggcgctggtgctgcgtgccaagtacctggtggacgtgcgcaccttcagcaaggtgcgcggacaacccctaccggtgggtgagctgacgcaatacctggccggacatctggacgagatcgaacaggaggcccgtcgatgagcatcgacgcgacacaggcagacgagcaggccaatggcctgctcggggttccgctggcgaccacgccactgaaccgcaaggacttcgtcaccgaggagccccgctggtgccccggctgcggggactattcgatcctgtcggccttccagcaggtgttgcccgagctggggatcgcccgcgagaacacgatggtggtctcgggcatcggctgctcgtcgcggctgccctattacctgaacagctatggcatccactcgatccatggccgggccacgacgctggccacgggcctggcggtcacccgtcccgacctggcggtgttcgtggtgaccggcgacggcgacgccctgtccatcggcggaaaccacctgctgcatgcgctgcggcgcaatgtgaacatcaccatcctgctgttcaacaaccgcatctacggcctgaccaagggccagtactcccccacctccgccgtgggccaggtcacgaagtcgagcccgatgggcgcgccggatcgtcccgtgaacccggtgtcctatgcgctcggctcggaggccaccttcgtggcgcgctcactggattccgaccgcgagcacctggtgtcgaccattgcagccgccgcccaccatcgcggtgcgagcctggtggagatctaccagaactgccccgtgttcaacgacggtgccttcgaggcgctgaagggccccggggccgacgaggcagtgatcccgctggtggccggcgagcagatccgcttcggcaccgaccgcgagctgtgcgtggtgcccgacgccaacggcggggtgcgcatcgcgaaggtctccgaggtcaaggaggccgacatcgtggtgcacgatcccaccaatcccgatcccacccgggcgttcgcgctgagtcggctcaccgattccggggtcatgcaccgggctccgatggggatcttccgcgacatctcgctgcccagttatgacgaccaggtgcgcgcccagatcacgcaggccacccatggcgaggccaacccctcgtcggatccggcgctgcagaacctgatcaacggcaccgatgcctggttggtcgaataggtccgggcctgcccgggggacggggcaccaaccccacccaccatcgtcgcgagccatcgtcgcaagtgaccgcggcgggggcttcgctgatcgcgagaccggccgattccgccgggacgatggtgggtgatgggtagccttgggcaggtgagcactcctgcattccatttcgaggatttcgacaagtccgtcgcccccaccaccgacctgttccgccatgtcaatggcacctggctgaagaacgcggtgatccccgacgaccgcagcaactggggtgcgttcgccatcctgcgcgagaactccgaaaaggcggtgcacgagatcgtcgagggccttgaggccggcgatgatcccaccaccgaacaggcgaagatcgcgaacctgtacgcctcgttcatggacgaggagaccatcgaggcgctcggcgtctcgcccctggcaccgatcctggcgcgcgtcgacgcgatcgccagcgtcgccgacctggcgtcgttctggggctggagcgtgcgccacggcatcaacccgctcgctgacttcgacaacgattccgacccgggcaatccgaaccgctatctcatgttcgtgggccaggccggcatcgggctgcccgacgaggagtactaccgcctgcccgaccacgaggacctgcgggcgctgtacctggcgcacatccgcaagagcttcgacctcgccggcgtggccgacgccgacggccaggcgacgatggccttcgagctggagaagcagatcgcggcctgccactgggacaaggtgcgcacccgcgacatgacccagatgtacttcccgcagacctgggacgacttcaccgccgccacccccaccctggaatgggattccttcctggccggcgcggaactcccgcgcgaggccgtcagcgaggtggtcaacgcacagcgcaccttcctgggcgacgtcgccaagctcgtgatccccgagaacctcgaccgctggcgggcctgggcgcgctggcaggtggtcagtggcctgtcgccctatctgaatcgcgacctgagcgcgcagagcttcgagttctattcgaaggggctgcggggcgtccccaagcagcgtgcccgctggaagcgcggcgtctcggtgaccgagggcgtgctgggtgaggccatcggcaagcgctatgtggccaagcacttcccgccggagaccaaggctgcggccgatcggctcgtgcgcaacctgctggaggcctatcgggcgtcgatcagcaccctggactggatgaccgaggccacccgcgccgaggcgctggacaagctgtcgaagttccgcaccaagatcgggtatcccgacaagtggcgcgactactcggcgctggagatcgcccccgatgacctgctcggcaatgtgctgcgggccgattccttcgaattcgaccacaccatcgagcagctctccgggcccgtggatcgcgacgagtggttcatgtatccccagacggtgaacgcctactaccatccgctgcgcaacgagatcgtcttcccggccgcgatcctgcagcccccgttcttcaacgtggatgccgacgatgcggtgaactacggcggcatcggcggggtgatcggccacgagatcggccatggcttcgacgaccagggctccacctgcgacggtgacggacgactgcgcaactggtggaccgacgacgaccgcaaggccttcgaggaccgcacgcatgcgctcatcgcccagtacaacgagctggcgccctcggtgtgccccgaggtacatgtcaatggcgagctgacgatcggggagaacatcggcgacctgggcggcctgtccatcgcctatcaggcctggttgctctcgttgggtggcgtcgagccggcgccccaggacggctatacggccgcccagcgcctcttcctgggctgggcccaggtgtggcaggacaccaccaggcccgagcagatgcgccaatcgctggccgttgacccgcactcccccgacgagatccgctgcaaccaggtggtgcgcaatatctcggccttccacgaggccttcggcaccaagccgggagatcccatgtggctggagccgagtgaccgcgtgcagatttggtagcctgacgcgcacccctcaggacccgtgggcggcaccccgccgtgggactgcgtcgtccgcgcacattccgactatgaggagcaccacatgagtttcggtgaagccgtcagcacatgcctgcgcaagttcgctgatccgaatggacgtgccagtcgggcagagttctggtatttctacctggccctgctcctgggcaatgtgggcgccttcctgctcgcgacgctcgtctccatcgtggtgccgccggtgggcggaggactgttcctgctcatcctcgtggccaatgtggtgagcctcattccgctgctgtgcgtgcaggcccgccgcttccatgaccaggacctgtcgggggcgctggtgctgctcaacctgttcttcctggtgattccgctggtcttcatgtgcctggagggcacgcgcggccccaaccgccacggccccgatccacgatggggcgatgacgcgggttacgggccggcgctgtacggcccggggcagggcggctatgcactgcccgccccggacgtctcctacggacagcccggatacggcccgcagcccggttacggccaaccggacgccccgggcttcggccagcaggcctatggccagggctacgagcaatcgacctggggccgggccgactacgcccagccgggctacggccaccagcaggcggcccctgcctggcgtccggacgcctcagtgccgccgtcaccggccttcggccagcagggcgcccagcccgatcctgatgcgcgcagctactaccccgatggttcgcgcgatgtacccggcgaaccctccgcggcaccggccggcgggcccgatcccgcaccccaccagtccagcccgttccccccggcgagttcttacccgaccggcgggaacggctaccccgccagccccgtgcgccccggcacccaggtgggaccccaggcccagccgacccaggagcccgccggttcccgcgacgcgttcatgcccggcccgcaggacgccgagccgacgctgctggacaccggtgcccaccacgacgcacgcaatggcgccgaggacgacacggttcggctggagaacccggcggcgtccgaacagaccgtggtgctgggcgacacggcagcgtccgaaagcaccgtcgtgctgggcgacacgacgcccgtgccgaccactgaccccgaccagttctgggcatcaccgggcgccgacagcgccacccgtcccccgaagaacgccaccccacccccatccggggacgactcgcaggagccccccgccgtcaccgggcggtgaccgcacctctaccgttgtaggccaacgaactgtccttcccgacgaattcatccgcgaggaacaggagaggccatgagtcccctcgaagcgatcaagagctgcttccgcaactatgtgaaccccaacggacgatccggacgcgccgagttctggtggttcctgttcttcatcctggtggtcgactccgtgttgggcctgctggcggtgctcaccggagaccacacgacgctggccgatgacggctggttctacgcgtatatgtcacacaacgtctggttcaacgcgctgggctgggtgttctcactggcgatgttgctgccgttcatcatggtgcagatccgccgcttccacgatcaggaccgcagcggctggtggttgttgctgcacttcattcccggcttcgggaacttcatcgtgctggtgttcatggcgatcgggggcaccttcggccccaaccgctacgggcccggacgctatgacccgcgcgccgccttcgaccccgacacgccgttgacgccgacccgctgagcagcgccgaaccaggatagggccgaaccaggatagggccggacccggatacgacaggacccggatacggcaggaggggtgtcccgacgctcgtcggggcacccctcctgcctctgatcagaccctgtgctcagttcgagcggctgaccacctcgtcgcacaggcgcgacagcgcgcgggtcgcggcaccatcgggcaacaggtccagctgcttgcgggccagttcggcgcgctgcacgatatctgcacgcgcctcctcgatcacatggttggcacgcagcatcgccagggtgcgtgccagcacgtcgtcgtcggccaggtcgccggcgatcaacgacttcagctcatcgtcgtcggaatcctcgctggcggccagcatgagcgtcggcagggtcgagacgccctcgcgcaggtcagtgccgggggccttgccggaatcgtccgacatgatgtccatcaggtcgtcggcaagctggaagaccacgccgatctgcatgccgaactgcgccagcgcatcgagcacctcacggcttgcgccactggtcatggcgccgaacaccgccgacgtgcggatcaacgccccggtcttgccggccaccacgttgagatagtgcaacatcgcgtcatgaccgggctgggggccgcgcatctcgtcgatctggccggtgaccagttcggcgaaggtgtcggcctgcatccgcacgaagtcgttgcccaatgtggccacctggttggaggcccgggcgaacaaccagtcacccaccatgatggcggtcgaattgccgtacgccgcattggcgctggggaccccgcggcgcaatgccgcatcgtccatcacgtcatcgtggtagagcgaggccacatgggtcagctccaccacgacggccgcgatctgcgccgccgcgtcgttgggctgcggccccagctggctggtgaccgccacgagcatcgggcggaagcgcttgcccccggccgcgatgatgtgctcggccgcctcagccaggaagggattggctgccgtcagcgtgatcgcgctgaggcgccgttccaccgcatccagctgatcgccgacgtaggcctcgaaagcctcgtcctcggcctgcgtcaaggtcgtctccttatcagcgcaggaactgtgctgcgccggtgaacaggtcaagtaccggccccggcgcaatgccgagaacaacagtaccgacaacgccgatgatgatgaccagccaggtgggccagccagccttgaccacgtcaacttccatgtcaggttccttgaagaacatgatccacacgacgcggaagtagtaggccgcggtcacgaccgacaggcagatggccacgacggccagccaggcgtagccgccctgccagcccgcgctgaaggccagcagcttgccgatgaagccaccggtgagcgggatgcctgccatggaggccaggaacagcgtcatgatcaccgcgagcacgggacgacgcctgcccagcccggcccatgcgtcgaagccattggcctcgccgccggcacgccgcaccatgggcaggatcgcgaaggctcccagcgtcgccaggccgtaggcggccaggtagtacatcacgctggacacggagccggactcgccggcggccaggccaccagcagcggtcacggcgccaaccaccgcaatcatgatgaagccggcatgcgcgatggacgagtaggccagcaggcgcttcacgtcggtctgtgccaggccgacgacagcaccaatcagcatggtggccagggcgatgaccaccagcaccagctgccagtcccagcgggccccgccgagcgcgacgtagagcacgcgcagcaggccggcgaaggcggcgatcttggtgcagatggccatgaagccggtgaccggggtcggggcgccggtgtagacgtcgggaacccagttgtggaagggcaccgcgcccaccttgaacagcacgccggaggtgaccagcgcggtgccggcgagcaacagcccgatcgactcggtggacagggtgatggaacggtccatcagcgcgaagttgaagcttcccgtgtagccgtacagcagcgcggcgccgaacaggaagaaggcactcgacatggcgccgagcatgaagtacttcagcgcggcctcctgcgacagcaggcggcgacggcgtgccagggcacacatcacgtacagcggcagcgagaggatctcgagtgccacgaacatggtgagcaggtcgttggcagccgagaacaccagcatgccgaacagtgacatctccagcagtgcgaagacctcggagttctcctggcgcgcggcgatggcctggcgctcagccaggctgccgggcaccgtatggccctgcggggcgaaggaacttgccccgccgccgatgcgacgctcgccatagagcagcgccgagagcagcccgaacgacagcagcagcatccacaccacgcgggtgggaccgtcgatcgacagcgcacccatcacggcggcccccggctgcgacgaccagtcgaagcagaccaggccgagcgcgacggccatggtgatcacggcgatcgcgaactgcacgctgaagcgcttgccgcgcttgatgaaggcctcggcgagcaccgagacaatggctccgacaatcaggacgatgagcggagcgatcagcccgtattcaatcgtgggagtgtgcataactcacttacccctcttcacagtgggctgaggatcgaccatggaaacctgaaccattgcttccttcgcagtcgggttcacgacgtcgaacgttggcttggggacgcacccgaagaacagcagcagggcgatcagcggtgcgatcaccagacgctcgcgaccggtgaggtcgtgcgtcatgtgcttctcgctctgctccgtggcgggcccggtgaacacgcgctggtacgacagcatgatgtagaccgcggcaagcaccgtggcgaccacggccaccgcaacgaacaccaggtgacgctgccagacgccggccatgatcatgtactcgccggcgaagttcgccaggccgggcaggccgagcgtcgccaggccggccgtcaggtaaacgcccgcgatcagtggcacgagcttctgtgcgccaccgaagtcggcgatcagtgcgctgccgcggcggtcgatcaggaagccgaccaccaggaacatcgccgcagcgctgaatccgtgggccagcatgtagaagatcgaaccggcgatcgactcggtggtgaacgagaagatgccgagcaccatgaagccgaagtggctcaccgaggtgtaggccaccagtcgcagcaggttcttcgaaccgatcgccatgaaggcgccgtagaagatcgagatcacggccagcaccagcacgaacggtgacgcccacttggtggcctccgggaagaaggccaggcagaagcggatcatcccgaaggtgccgatcttgtcgagcgtggccaccagcagggtcgaggcaccgggcctcgcctgctcggcggcgtcgggcaaccaggtgtgcaccggcaccatcggcgccttgatcgcgaaggcgatgaagaaggcgacgaacagccagcgctccatgccctggcccatcgacaggccggcgaggtccgcggtgagcaggctgggcttgccggcaccggccgacacggcgtacatgccgatcacgccgagcagcagcacgaagccaccgaacaggctgaacagcaggaacttcatcgccgctgcggcacgtcgggcgccgccccatccggcgatgaggaagtacatcgggatgagggttgcctcgaagaagatgtagaagagcagcaggtcggaggccatgaacacatagagggtgaagccctccagcatcagggccagcgccatgaaggtctcgctcgaccaacgcgccggggccacctgcgaggtggtgtcggcggcgttctggttctgcgtcgaggaatcaccgacatgccattcggcgatcagcacgatgggaaccaggatgacggtgagcagcaccagcaccttggacatgccgtccaggtcgagtgcgtaccatgcgccgatcggcgagatccaactgaccttttcggtcagtccggtcatgaagaaggtcgccacgcccaccacgagggtgaccagcgagaacaccattgcggccaccttgccgccacgtccgcgcaatgcgaagacgatgacggagccaaggagcggcagcagacccagaaccgtgagccaggggaaagtcatcactatttccttcctcaggccagctggcccaggatcatcacgacgccgatcacgacgaggccgagggccatcgtgacgccgtacgttcgcacatagccgttctgcagcaacctgagagcaccagaggcaccggtcaccaccgcagcggaactacgcaccgtgccgtcaaccaggtggttgtcggtgagctccaggccattgcacagggcctgtccggggcgcatgagaaccgcctcgttgaattgattggcatacagctcgttgcgtcctgccagcacgaagaagttgtgcgagacgggcgtctcctgcgcgatgttcgagcggtagagcaccacgccgatcaccacgccgagcgccaccgcgagcagggtgaccaggctgatccaaccggtgtcgaagacatgcacgggctcaatctcgttggccacggccggctccaaccagccctggatccaaccgttgagggccaggccaccgaccacggagatgatcgccaggatcaccagcgggaccaccatgagcgcaccgggcttgtgcgggtgcacaccgggcagccaacgcttgttgcccatgaaggtcatcatcatcaggcgcgtcatgtagaacgcggtgataccggcgccgatcagcgccagccagccgaagatcgggcccttgtcgaaggcggccacgatgatgtggtccttcgagtagaagccagcgaagaacgggaagccgatgatggccaggtagccacaggcaaaggtgccgaacacccagggcatggccttggccagtgccccgaagtggtgcatgttcgtgtcctcgttcatcccgtgcatcacagcaccggcaccgaggaacatattggccttgaaggcaccgtgggtgagcaggtggaagatcgcgaaggcggcacccgccggtccgagcccggcggcgagcatcatgtagccgatctggctcatcgtggagccggccagcaccttcttgatgtcgtccttggcacagccgatccaggcgccggcgaacaccgaggccaggccgacgatcgccacggcgaggctggcggagttgctcagcgcgtagatcgcgtgcgagcgcaccaccaggtagacgccggcggtcaccatcgtggccgcgtggatcagggccgacaccggggtggggccctccatggcatccagcagccacacctgcagcggcacctgggcggacttgccgcaggcggccagcaacagcaggcagccgagcgcagtggcccaggccggcgagacattcgccaccgagttgctcaccacgtcgaagcgcaccgagccgaacagcgagaacatcgcgaagctggcggcgaacaggccgaggtcaccgaccttgttggtgacgaaggccttcttggcggccagggcggccgagttgcgctcctgccagaagccgatcagcagataggacgccaggccgacgccctcccagccgatgaacaacatgatgtagttgtcggccagcaccagggtcatcatcgaggcgacgaagaagttcaggaaggcgaagaagcggcgacgcttcgggtcctccttcatgtagccgatcgagtagatgaagatgagggagccgacgaaggtgaccagcagtgcaaacaggatcgacagctggtcaaccagcatcgagatgtcgatcgagaatgcgccggcgctcacccatgtgtagacgggtacccggaccgaccggctggcctcgtcgctgcccatcatcgagatgaagagcaacagtgcgatcacgaaggacgcgatcggggcgaggacgccgaggaggtggccccacgcgtcggcaagcttgccgagcacgaggagcagacccgcgaccgcgagcggaatcgcgatcatgagccatgcgtaactgaacaatccggtagctgcgaccggattcatggtctgaagaagattcaccgatgccccctcagtgcttcagcaggttttcgtcgtcgaccgaggccgagcgtcgggtgcggaaaatcgtcatgatgatggccaggcccacgacgacttccgcggcggccaccaccatcacgaagaatgcggccacttgaccgtcgagattgccgtgcacattggcgaacgtcgccagcgacaggttcgcagcgttgagcatcagctcgatcgacatgaacgcgatgatcgcattgcggcgcacgaggaagcccagcacgccgatgcagaacagaatcgcggacaggacgatgaacgcattggggttcatcggttgacctccttgagtccgttctcgtcagtcggctcagcggcgagctcatcgtcaccgggcacgatgcccttctggtcgtcgcgcacatcgacgatcgccttgttggcgctcttcgtcggggtgagcaggcggttcttgtcgaccacgacgatgccgcgttcagccagcgtcgggatgatcgagtcgtccgagatggaaccatcgggcagtaacgagggatagtccaccgaattgtgtcgggcgtacacgccggggttcggcagcggtccgggctgggtgcccttctcgccgaactccttggtgcggcggttgatgcgttccttctgctgttccttcttgaacagcggctcgccgtgcgccagcaccatcgccgccagggcggcggtgatcagcagggcggcagtggcctcgaaggggaacacatagtcgctgaagatcagataggccagcgagcgcacattgccgtcggcgcccgtggcctgttcgaggccggccgggctggagacgatgccatggcccacggccagcacgagcagcgccagcaggccgacgacgccgatgatggcggcgacgcgctggcccttgatcgtttcgatcatctcgtcgacggtgtcaatgccgatcaccatcatggtgaacacgaacagcatcatgaccgcgccggtgtagacgatgatctgggcgacgaacaggaacggcgcgtcgaggcttgcgtacaggccggcaaggcacaccatgagaccggcgaggcagagcgccgagtgcacgggcttgcggttcaccaccatgccgacaccggcaatgacgctgagcggcccgagcacccagaaggcgactgcctgagcagtgaccagggggatcatttcgcaactccagtccagttgttggcggccgcacgcgccgcgacgaccacgccgcgctcgtccagctggttgctgggaggcaggccgaggaagtagtcgtcctcgtcgtcaccgagacggcggggatgcgggggctgctccatgcccggcagcagcggggcgagcaggcggtccttgtcgtagatgaggctctcgcgggtctcatcggcgagcttgaactcattggtcatcgtgagggcccgcgtggggcaggcctcgatgcacatgccacacaggatgcagcgcagatagttgatctggtagacgcgcccatagcgctcaccggggctgtaacgctcctcctcggtgttgtcggcgccctccacgtagatggcgtcggccgggcaggcccacgaacacagctcgcaacccacgcacttctcgagaccgtcgggccagcggttcagctggtgacgaccatggaagcgcggagcaacgaggcgctccttgcccttctccgggtaaccctgggtgaaggacttgcggaacatcgttcggaaggtgattccgaaaccggaccacgcacccatttacagcacccccttgatcgacttgcctgaatctggacctgatgaatctccgcccgagggcgcccggctgggcggcgcgggttcggaggcgacgatgccggcgtaggcagcaagcttctggccgggcatcggcggcaccgggtagccgtcggcgaaggcatcgaagacctcgtcgtcggcgtcgtcgggttcggcctccttcttgcgtggccacagcgcataggcgagcagggccaccacgatgactccgacgatgacgcgcatggccgggttggcgaaccaaccgttggcgatgccgccgcgcatgacggccaggaagaggatccacaccaggttgatcgggatgagcaccttccaccccaggtccatgagctggtcgtagcgcacgcggggcactgcgcctcgcacccaggtgaacgagaacaccaggaactgggccttcagcacgaaccagagcaggccccaccagccgttggacagggcgcccccggcgatcatgttgaacggccacggcgccgagtagccacccaggaacagggtggtgcagacggcggacacggtgagcaggttgatgtactcggccaggtagaacatggcgtagcggaagccggagtagtcggtgatgtggcccgagaccagctcggactcgcactcggccatgtcgaagggcaggcggttcgtctcaccgaacatcgagatgaagtaggtgacgaagctcggcagcaacaacagccagtagtgcgaggggaagaaggtctcgaagccgaagaagtcgaggttctgcatctgcgcagcgacgatctggctggtgctcatcgaaccggcgtacatgaacaccgcgacgagcgagaggcccatggccacctcatagctgatgagctgggcggtggcgcgcatggagccgagcagcgagtaggtgccgttcgatgcccatccggcgagtaccacgccgtagacgccgatggacgcgatggccagcaccagcagcaccgagaccggcaggtcagtgatctgcagccgcgtggtgtgtccgaagatcgtcacctcgccgccgaaggggatcaccgcccacgagctgaaggccgcgatggcgatcagcatcggcgccaggttgaagaccagcttgtcggtgcgggcggggcggaagtcctccttgaacagcagcttcacgccctcggcgatggtctgcggcaggccgagcgggccgttcatgatgggaccgatgcggttctgcatcttcgcgatgatgcgacgctcgaaccacacattgaagatgatccacagcagcacggcaacgaagaccacgaccaccttgatgagcacgacccaccaaggatcagccccgaagatcatgttctcttgcggaatcatgcggcacctccggtgacttcgacccgtgtgccggcagcggccacgagcccactattaacggaatttctggtgttaccgggcacccacaccacgccgggcaccatggagggcacgatcgtgagcggggcggtgaacgtggtacctccgacgcggaccgtcacggcctgtccgtcggcaactcccaggccggtggcgtcggccggggccaggcgcaccgacggcgcgggggccgtctcgagcagggcggtggcgccatcgagtccggcggcatcatcgatcagcaaccgccaggaggacaacacgaagttgcccgacccggcgtcggtcgtggcgggggcctcgaccgggagcttgtcggcattgcccgaccagtccgagatctcgtcgaaggcgagacgggcctgggtgggagtgcgcatgccgaggtccgaaccgagcgcatcggccagggcggccagcacccgcacatcggtcatcggcgaggtggtctcctcattgaccagggccaccggacgttcgcggtgctcccagttgatgaaggtgcccacctggtcctcgatgagggccaccggcagcaccacgtcggcgcggtcggcgatctcactgcgacgctgctccaggctcacgacgaacccggccgctgacacggcggccagcacggcatcgggatcggcgaagtcctcggcctggatgcctgcggtgaccagggcctccaccgaacccgaggcgacgtcgcggatgatcgcggcggcatcacggcccgactgggcgggaagctgatcggccccccacgcggcctggacatcaacccgcgccgaggcgtcggcaacatggcgtccgccgggcagcaggcccggcagcaggccggcctccagggcacccagctcgccggcacgacgcgggatccaggcgaacccggcccccgtgcgctcggccagctcggccaccttggtgagtgcaccggcgctgagtgcggcccgctcccccaccaggatgatggtctggtcgtcgagttcgccggcagccgccagcttgtcgagttcagcggcctcggtgccgggggccgtcggccacagccgcgcccccatcttctccgagccgcgggtggcgaagggcgccaacgacacgacctgcagcttgttcttgcgccacgccttgcgcaggcgcaagaagaccatcggggactcgtcctcgggctcgaagctgaccagcaccaccttggtggccttttcgagggcctcgaaggtgaccgaatcggccagcttgcgtcccaccacgtggttggtgaggaaggtcgcttcctcggcgcttgcggcgcgcgagcggaagtcgatgtcattgctgcccaccacagcgcgcgcgaagcggctgtaggcgaaggcgttctcgacggtcaggcgcccaccgggcaggaacccgaccgacttgccggcccgcgacagcccctcggcggcggcatcgatggcctccggccagctggccggctccagggcgccattgcgacgcaccagcggagtggtgatgcggtcatcgccgtggcccgaacggaatccgaagcgacccttgtcgcagttccattcctcattcacagccggctcattgcccgcgaggcgacgcttgacctggaagtgacggtggtcaacacgaagctcgcaacccgacgcgcagtgctcacagctcgactgggtgctcaccaggtcgtgcggacgcgactggaagcggtagtcggcactggtcagcgcgcccaccgggcagatctggatgatgttgcccccgaagtaggaggcatagggctggtcggcgtactcaccgacctgcgagaacgcgccgcgctcggacagcgagatgaagtcatcgccgctgatctgctcgctgaagcgcgtgcagcgctggcacaggatgcagcgttcgcggtcgaagacgatctcggcattgatgtgcgtcggcttggcataggtgcgcttgacgccctcgtagcgcgtctcgccgcggccatggctcatcgcctggttctgcagggggcattcgccgcccttgtcgcagatcgggcagtcgagcgggtggttgatcagcaggaattcgatcatccccgactggtgcttggccaccgtcggattgctgtctgcggtctccaccttcatgccgggcattgcggacaatgcacaggccggctgcggcttcatcgcccggccgttgccggcgtcgggcacctccaccaggcagacgcgacaggcggccaccgggtcgagcagcgggtggtcgcagaagcgtgggatgtcgatgccgatcatctcggcggcgcggatgaccagggtgcccttcggcacgctgacctctgccccatcgatggtgaaggtgaccagatcaggcttggtcgcgacctcggatgacttggtatcggtgctcatgccgtggctcccgtcatggtgatcgactcgcggtcggggtcggcgaacagggcgctcttctcgtaggggaacaattcccaggccggcgtgtgatagccggcctcgaactcggagcggaagtgcttgatggcgctggtgatgcaggcgacgaagccgtcggccagcgtgcagaagctcttcatcgacacgttgtcgcagacgtcgagaagcttgtcgacgtcaccctcctggcccttgccggcctcgaggttgcgcaaggtctggacaagccaccagctgccctcacgacagggcgtgcacttgccgcagctctcgtgcttgtagaactcggtccaccgcagcgtggtgcgcaccaccgaggtggtctcgtcgaacacctgcagggccttggtgcccaggattgaaccggctgccgagacgccctcgtagtcgagcggcacatcgagctgctcgggggtgaacatcggcgtggacgaaccaccgggggtgaagaacttcagctggtggccgtcacgcacgccaccaccgagttccaggatctggcggaaggtgatgcccagcggtgcctcgaactgcccgggacgcttcacatgtcccgacagtgagtagatcgtggcccccttggacttctcagtgcccatcgactggtaccactcggcgccgttgcgcacgatggccggcaccgaggcgatcgactcggcattgttgaccacggtggggcaggcgtacaggccctcgaccgcggggaacgggggacgcaggcgcggctggccacggtggccctccagcgcggagagcagtgcggtctcctcgccacagatgtaggcgccggcacccgaatgcaccacgatgtcgaggtcgtatccggtgccgaaaaggtccttgccgagatagcccttgtcgtaggcctcgcgcaccgcctggctcagccggcggatcgcgtgcagcacctcgccgcggcagaagatgaacgcatggtgggcgttcaccgcgtagcaggcgatgatgatgccctccagcagcgtgtgcggcgtggcgatgagcatcggcatgtccttgcaggtgccgggctccgactcgtcgcagttgaccacgaggtacttgggcttcgggttgtcctgcgggatgaaggaccacttcatgccggtggggaagcctgcgccaccacggccccgcaggccggaggccttcaccaggtcgatgacctcgggggacttcatggtggtcagggccttgcgggcggcgtcatatccgccgccgcgcacataggtgtccagcttccacgagtccggggtatcccaatccttcgtgagaatcggggtcagtgtgtctgtcacttcccaacctccttcgcacccggctggccgggggcctgccagttgttcgcttcagcgatcttgagcccgcgcaccgaggattcgccggcgctggggccctcatcggcccgtccgtcgtcgaatccggcgagcacgcgctcggcgctgcgccagtcggtgatggtggcgccgcgggtggacttgaccgtctcgccggcggcgagcttgtcgagcagctcgtcggccttggcgggggtcatattgtccatgtattcccaattgaccatcatcacgggcgcgaagtcgcagcccgcattgcactcgaggcgctcgaggctgaacttcccgtcgggggtggtctccccctcgtggatgcccagcttcttctccacatggctcaacaggatgtcgccacccatcaccgcacacagcgccgtggtgcacacgccgatgtgctggtgtccggccggacgacgcttgtacatcgtgtagaaggtggccacgccgttgacctgggcggtgttgacgccggcgatctcggccaccgcgcgcatcccggcgtcgctgacccggccgtcaaccgactgcaccaggtgcagcatcggcatcagcgcggaccgcgcatcgggatagcgggcggcgatggctcgcatctccgccatggtctcttcggtgatattcgtcgactggtcaacggcatcgatgccgtcggcgtcgtcgaaggccgagacgaactcgtgaccgctcatcggctaaagctccttgtcaaggacgaacaaatgacgaaatcagagcgcatgggcttcatcggtccacgccacccatcacggggtcgatcgacgagatggccatcaccgcatcggagagcatgccgccctcacacagcagcggcagcgactgcacgtggttgaacccgggatcgcgcaggtgggcgcggtacgggcgggtgccaccgtcggagaccaggtgcatgccgagctcgccggcgggggcctcgacggccatgtagacctcgccggccggcacgtggaagccctggctgacgatcttgaagtggtggatcaggccctccatcgactcgcccatgatgtgcttcacgtgctcgttggagttgccctggccatcggaggcgacggtcaggtcgctcggccacgacaggtcggcgtcctcgatgcggtacggctcacccttgctctcggccagctcgtcgcgcacctgttcgaggatgcgcagcgactgctcgatctcgttgaggcggatgacgaagcgtccgtaggaatcgaacgaatcggcggtgcacacctcgaagtcgtagttctcgtagccgcagtagggctccatcttgcgcaggtcccaggggtaaccggccgaacgcagcaccggacccgaggcgcccatcatcaccgcagaggcgaggctcatatgggccacgcccttgttgcggcgcacgaagatcgggttggtcagcgtgtactggccgatctcgggaacgttcttgcgcagctggcggatcagctcgtcgagcaggtccagcccgtcctcggggaggtcgttctcgacgccaccgggacggatgtaggcgttgttcatgcgcaggccggtgacggcttcgaggaagtcgagcgtgcgctcgcgctccctcagcgcaacctcctgcaccgaggtggcacccaggtcgaggccggtggcaccgaccgcggtgatgtgggaggcgatgcggttggcctccatggccatcacgcgcagctggttgccacgacgcggcatcttgtcggtgatgcccagcagcttgtcgacggccagcgaataggcggcctcgttgaagatgcccgccacgtagttgcagcgggtgaagaacaccgaaccctgcgaccagctgcggtactcggccgacttctcgatgccggtgtgcaggaagccgatgctggggcgcagcgagatgatggtctcgccgtccatctccatcaccaggcgcatcacgccgtgcgtggaggggtgctgcggtccgacattgatcacgatggtctcgtcggagcgctcgcgctgcgcctcgaccacctggtcccagtcgccaccattggcgaggtaggcgtgatcgcccttctcgtcgccggggcccgcaaagatatcgtcgtcgtcggtagcggcccgcgacgcgtctgagtactgctcgctcatcggttgtagctcctgcgatcgtcagccgggggcacgacggctcccttgaattccaccgggatgccacccagcgggtagtccttgcgctgcggatggccgacccagtcgtcgggcatcaggatgcgggtgagggcgggatgtccgtcgaagatgatgccgaacatgtcccaggtctcgcgctcatggaagttggccatcgggtagaccggcaccaggctcggcaggtgcggatcgtcctcggagacctccacctccaagcggatcctgcggttgtaggtcatggagagcaggtggaacacggcgtgcagctcgtgcccggtctgctcgggatagtgcacaccggacaccgacacgcagatctcgaagcgcagggcctcgtcgtcacgcaggtgcttggccagctccaggagcttgtcgcggtcgacgaagaaggtgatctcgccgcggtgcaccatcacgcgggtggcgaatccggggacgagctcggccatccggtcggcgacgtcatcgaaccagccaccgaagggcggctcggtgctgccggtcagtgagatgacccggcgcatgccctcgaagccggaggtgtcccccgactcgccgggcttgcccgatccccacatgccctgcacgcgggagatgacttcctggccggcgtcggtcgccttgggcgagaacagctgggcgaggtgcttgtgggtgtcatcggcagcccgcattgcgcggccggctgcctcatccttgtcgggaaggttctgctcgctcatcgcatgagccccttctgctcgatggtggcgggcgctgccagggccttctgctccagctcggcaacctcctgcacgcggtgggcgcccatcgtggtgtgctgcaccttgcccttcttcagcttgaagacggcgtcaatgagcatgtcgggccgcggcgggcaaccgggcaggtacatgtcgaccggcacgatgtggtcgacgccctgcaccacggcgtagttgttgaacacgccgcccgagctggcgcatgcacccatggcgatgcaccacttggggttcggcatctggtcccacagctggcgcacgaccggcgccagcttctggcccacgcggccggcgacgatcatgaggtcggcctgacgcggtgaggcgcgaaagatctcctggccccaacgcgagcagtcggcacgcgggccgccgtagctgatcatttcgatggcgcagcaggccaggcccatggtgagtggccagaaagatgcctggcgcatccagccctgcacctgctcaaccgtggtcagaaagattccggccggaagtttctcttcgatgcccatatctgttcacccagcctttcagtcccagttcaatccgccgcggcgcaatacataggtgtatgcgacgaagacgacaatgatgaacgtgatcatttcgatcactccgaagctgcccaggtggtcaaaggcgaccgcccagggatagaggaagacgatctcaatatcgaagatgatgaagagcatcgccgtcacgtaatacttgacagagaagcgcccgccgccggtcagcgtctgcggcgtgggctggataccgcactcgaaggagtcgtacttcgtgcggttgtagcgatggggaccgatgagcggggacagcacgatggccgcaatgaccacgaacagggtggccagtgccaccagcccgataaccggaatatatgcgttcatttccgctcgatccttccgtcgaagtacgtcattgtccaaccgatccaggtgcgccgttacgcgggcggcgccagcctactcaaagtgttgatcaggtgatccatcgcatcaccgcggtgctcatcggtgagattggccaacaacttgttgaccaacttcatgagcgaacgatggggcaggccgtaggtggtgcacaggtgcatgatctgcggattgccgatgagtttcacgaaaatggtgcccaggcggtaatagccaccgaaacgtgatgacaacgccgtggggtaggcgtgcagtgcacgctcggcgccgggcgtgccgacgccgcgggaatgggcctcgctgatcgcatcagccgcaagctccccggcctccatggcatagctgatgccctcgccgttgaacggattgaccatgccgccggaatcgcccacgagcagcagtccgtcggcgtaggcgggcttgcggttgaaggccatcggcagcgccgccccgcggatctcgccgcgctggtgggcctcgtcgaactgccattcgggtggggtggtggccaaccaagtgcgcatcagtgcgcggtagtcggtgtgcccgaacgccgacgaggagttcagcatgccgagcccgacgttgacggtgccatcggccatcgggaaggcccagccatagccgggcagttggttggattcgccgggacgcccgtcccacagctccagccagctctccatccactcgccctgcgcccgggggctctcgaagtaggtgcgcaccgccacgcccatcgggcgggcctcgtcgcgctggcgccccatggcgacggccaggcgcgtggaattaccgtcagcggccaccacgatcggggcgcggaactcgcgtccctgattgtcgcgcaccccgacgatgcgatcgtcggcggtgatcggctcggtgacattgacgccggtgtgcagcgtgacgcccagcttcatcgcgtggcccgccagcacatcatcgaagcgcgaccgcgggcacacgagcccgtagtcggggaaatcggccagttccggccagggaagctcgaagggctcggtacgcccgccgtagacccgcagtcccttgttgcgcgcccacccggccgtctcggtggaatcgatgcccagccgcgtcagcatgcgcacggcgcgtggcgtgagcccgtcgccgcagaccttctcgcgcgggaactgcgacttctccaacagcaggacgctgagcccgcgcatggcacagaacgcggcggtggccgagcctccggggccggcacccaccacaatgacgtccgcttcggtggcgaacgagtcctggtcggccgtggacagctgggccgaggccagtgccggggcgtcacccatctgcacttcgccgtgcaccatgaagctctccatccgaacaccgatcccgggaaccgactctggactcccgggggctgtggcccaaggacctcgcctcgctcagtgtaagggtgagatggggggggttgccagtcggccggcagccatctgagacaaaatcggaccgatccagtcccgaaaacacaggctggctgcggtcaggggttatccatgcacggtgggatgcaattcgttccatcacgcggagagcgaaaagcacgatcgtgcacgtgccatcacacggacgcccgcggcggggtgcgaccacgggagtacttgggtgacccgcgggtcccatccgcgggaactgtcggttagcctcgtggggtgatcatcaatccgggatcgtcgcgactgcacgcgagcaccatcgccatcgatgacccgggcgcgctcacacaatatgtggacggccacggcgccgcgttcctgcgcggcgaagacggtttcgtcgcgatgggggaagtggcccggctcgacggcgccaccatgagtgaggccgaccagtggtggacccaactggctgccgacatcgagaaggaatccgagatgcccggcctggtgggcaccggccccctggcctacggcaccttcacctttgaccccgagcacaccgcagcggcctccgcattcatcgtgcccgagacgattatcggacggcgtgacggggtgagctggctcacccaactgggctacgaccgggtgaacccgcagatgcccgaggtacagcccgctccccaaccgcccgccgaactgttcttcgaggacggccagatctctggtgcggactggctggcgctcattgcccgcaccagcgccgcgctgcgcgccagtggcgccgagggcgtggtgttggcccgcgacctgcatgcgatcgccgagcagaagatctgtcccgcgtggctgctgcaccaatggcgtcgcaactacggtggctccacctgctacctggtggacgggctggtgggcgccacccccgagatcctcgtgcaccgacgcggtggcctgaccacctcgcgcattctggccggcaccacccagcgcctcgacaacgtggacgagcccgccgagatcgcccggctgctctcctcccagcagcgcatgcaccagcaccgactgtcggtggaatccgccgccacggcgctgggggcccatatgagtggcatccacgttccggaggcgcccttcgtgctggcgctgcccgacatgctccacctggtgaccgacatctgtggcgtcaccgagggcaccttctcgacgctcgccctggctgccgcggtgcatccgctgtcgtcggtgaccgggttccccaccgaccaggcacgcacgatcctggcgaacagcggcttcgaccggggacgcttctgcgcccccgtgggctggatcgatgcccagggtgatggcgactggttcgtcgccctgcgcgccgcgcagctgagccccgactggaagggcgtcacgctgtacgcctcggcgtcggtggatcccgatacggcgccccacaacaagctggtgtccaccgagatgaagttcgccctgatgcgacaattcctcgccggcgactgaatcaccgacgaggaatcgtccgctccgaagactgcctgcccagcgctacttgcgcagcgggggcctggtgcgcgccggggtgcccgagcgactgatcacctgcttgggccgcgtgcgacctcccccaccgcgggccgcctccttctgcgccgcgagctccttgcgctgttcctcgctcttctccatcagctcctgctggttgatgccgccgctgcgcagcaccatgaacgcgatcatggcgatgatcgccgagacgatcggcggccagttgagcaccagcggggcggtcaccagcaccgccacgtcaatgccacggatcaggttgaacatcaggcccgggggcacggcgccggcgccggtggccaccatgggcatgttgtagttcgccgacttggcgctgacccagcgcatggcgccgagcaggccggccgcggccgtgatgacgccgtaccacaaggtgttcgacaccgacacggacgccgcctggccgttgaggttcagcaggaatgccggggtgaccacgatggcccagatgagggccagggaggccggcacgatcgtggtggcggtgcgcagctccgaatcggtcatcgggaacagccgcgccaggcccttcgtgcgggtgagcacgcgcatcgaatccatgaacggcaccatgacggcgaccatgatcagggccgacaggatcggggtgagcgatcccacgcccaacgactccagcgcatagggcacgacgaggctcaccaggaagcccaccagcgggcccggggaacgcaccaggcgttgcaggtcacgccagaccagggcacgcgtgccgcgccagtggccgcgggccggcttcacatggccccgcaggtggttgcgacgctcgatgaggatgtcgcgcatcagcgcgaagtcaagcgcgaaggcggcgccctgcatgccggagacgagctcaccaccggtgatcagcttggcccggcccacgttgtcgaggcgtcgacgggcgatgagtgaggcgaggatcgccagcacgagaccggctgcggccacgacgatggccagctcgaaggagccggttccacccagccccaccgacaaccagccgctggccgaggcgatcacggccaccagcacgacgacggcgacgccgcccacgacaatctgcgcaacgcgcaccatgatggtgcgctcagcaccctgctcggcggccgtgaaggccatccacgcggcggtggtgaaggcggcggctgccgtccaggcacccaccgtcggcagcgggaggccgaccagcacggtgaccagggcggccaccacggcggcgacgccaccagcggcgaagatcatgccccacatgcgtcgggccagcacggaggaacggcgcagtggcgcgtccaacagccagaagccctccgcggcggaggcgacgatcggcccgaagatgcggctgatggccagggcgccgacccacaggcccgccacgaccaaccagggcagcagcttgcgggcggtcacgcagccatcggaggtgcacgtggacgcctggttctgcgccgacagcaggccgctgatgatcatggccgccacgaccacgacggtgaacatggcgacataggcgtcggtgatcacatcgcgcagtcgccgggtggcccgtcccttgcgccagtccttcaccaacagcagcagctggcgttcgtcaaccatgccctgggcgtcgaagccgacgtcgacgaacggatagtcgggatcgaatccctcgaagtccggatcgtcggtgggcgccggcctgcgctgctgtggcggacgcgcggcgggctgggccgcccgctccttacgtgaacgattgcggcgcttgttgcgtgagctcatgccagctgctccggctccgccaacgactgggtctcctcgaggccgccgccgatgcgcacgatgcgggcgccaacggcctccaccaggctcggctcatggctggccatgatgatggccagcccgttgtgctccttctcgtggcgcaagcgcttgcccagccagtcgatgccctcctggtcgaggcgctgctcgggctcgtcgagcaccagcagctttttgggacgcacgaacgcggtcgccagggcgaggcggcgacgctgtccactggacagggtgccgggcagctggcccgactgcggcaccagctgcacctcctcgaggatcgagtcgaccagctcgtcggtgtcctccaggccatgggcccgggcgagcaggtcaaggtgctccaccaccgacaggtcggggaagaagtccaggtcatcgatgacggtggccacattgcgtcggaaggagatctcggtgtccttggccttctcgcccaacacctcgatcgtgccctcggtcggcttgtcggagccgacgatgcacctcaggacggtggacttgcccgagccgttgcggcccgtcagggccaccgcatcggactcgtagacctgcaggttgaagtggtcgatcaccgtgtgatcgccgtacttcttcacaagattgctgattttcagaacagtggagcgcctcgccatgacctccattgtggtgcaaccggtgcgattcgcccacttggcgcccgacggtggatggacccgggcggccacagccgcccaccagtggatccccccgggcggccacagccgcccaccagtggatccccccgggcggccacagccgcgtcgaacgggccgtctgggagccatttgcgagttctgcgacaatggtggcgtggccagacgcgcaactcttgacaagaagcgggaacaggtcgcggggatgttcgacgatgtcgccccgcgatatgacctgctcaacgacgtaatgagcatggggcaggaccgtctgtggcgtcgcgaggtggtgcgcgccgtggacgcccagcccggcgattatgtgcttgacctggcggccggcaccggcacctcgtcggcacccttcgccgccgccggcgcccatgtgttccccaccgacctgtcgttcgggatgctcgaggtgggcaagcagcgccagcccgacctcaccttcgtgcagggcgatgccaccgcgctgccctatcgcgatgattccttcgacgccgtgacgatcagcttcgggttgcgcaatgtggaggacaccgccaaggcgctggaggaattgcgccgggtgacccgtccgggcggacgcatcgtgatctgcgagttcagcacccccacgtgggcgcccttccgggtgttgtaccaacgcttctacctgccccgggtgatgccgctgctggcgcacctgggctcaaatcccgactcctacagctacctcaccgagaccatcgccgcctggccgaaccagcaggccctggcccggctgatgtccgacgccggctggaagcgcgtcgaatggcgcaacctgtcgggcggcatcgtggccatgcatcgcggattcgcggactgacaacccacgatgagcacgggaacctcgtcacgccaacccgggggaacggctgacccacgggacgatcgggggacccccggcgccgcacatccggcgcgcctgagccatgacccacgccgtccgatcatgctggattcctatgccgcgcgcagctgcccggtgaagacccgcaaccgcttcgaccgcaccgtacggcttccggtgaacacctccagcgatatcgccatccgcgcgtccaccgacgccatgcaggagctcttcaccggctccacggccttcaagaaggaggtcatggacgccctggccgcccatccggacgccgtggacctgcgttcactgatggacgaggactggagcgaacgctcggcggcgacggctgatgcggtggccgccggcgccctgctcatcatcgccccggtgctgccgctggacgtggcgggccaccgcgccggccaacccgatgtgctcgtgctcggcccacccgcccccgatggcgacaccggctactacccggtgatcatcaagcggcatcgcgtgctggaggccagcccacggggacgccgccaaccctgcacccccctgtcgggcggtcagcgcctgctgcgcgtggcgggctgcggcgtgcgcacccaccgcgagggcgacctgctgcaactggcccactaccgacgcatcctcgaggccaccggctggtgctcgggcggggttccggtggccggcatcatcggcaccgacgagatcctgatccggcagggacgcccggtgctgggtcgtaaccgcacccaccgtcccggcgacctgaagcacctggtgatctcgtgggccaacctgggcgccaagcgcctgcgcaccttcgcgcgcaccgccagcagcggctggcgctatcgctcgtcgctggaacgctacgaccatgaattcgccttccgcctgaggatcgccgagatcgccgcgcgccgcaccggcagccccgacgaccccgacccccgcgtgcgtccgatcgtggtgcatgaatgcgagtcatgcccctggtgggtggcctgcaagccgcagctgaacgacgacgacctgagcctgcgcatcgacaaggctcgcctcgacgtgcacgagatcacggtgctgcgctcgatgggcatctccacgatcaccgacctggcctgcaccgacgtcgaacaattgctgcccacctacctgcccgaagtgcagcaccgtcccggcgccgagaaccgactgcgcctggccgccgagcgggccgacatgctggcccacgggatcgcggtgaagaagacctcggtggggcccatcgagctgcccgcgcagggctattcgattgacctggacatcgagacctccgccgccgcgcgggtctacctgtggggcttcctggtgaacgatcccgacgacgattcggggccccactacgtgagcttctcgcgcttcgaggacctcggccacgcgggcgaacgggcgctggccgaggaggccgccacgtggctcgtcgagcagctgacggcccatcccgaggcgaaggtgtaccactactccgattacgaggtggtgcacatccggcgcatcgcccgcaagagcgcgtcgccaagcctgcgcgagctcgcccagaactggacccggacgaacttctttgacctgtttccggtggtgcagaagaatttcttcggcgtccatgggctgggactgaaaaagcttgcgcacaacggggccgggttcaactggcgtgacgaggaccccggtggcctgaactcgcagtgctggttcgccgaggcggtgcacggccccaaccacgaggtgcgcgccggattcgccacccgggtgttggagtacaacgaggacgacgtgcgcgccacccgcgcgctgcgcgcctggatgcgcacgctcagctgagggccaccccgcccgctcagatcatcgagatcgcgacaccggccaggatgccgagggcatagcagagctcgcccaggccggtgttcttcagcgtcgcgaccagcgccatgccccgggcaccacccaggatcacccgacaggccggggccaggaacaccaggcaggccagtccgagcagggcccaccaggtggtcagcgccgccacgcccaccacggtgagcgccgccacgcccaccaggacggcatagagcacgcgcgtggcgcggtcgccgatgcgcgtctccagggtgcgcttgcccgaggcggtgtcaccgacgatgtcgcgcaggttgttggtcaccagcacggcacaggcgagcaccccgatgccggcggcggtcagccaaccgggcgcgcccacccgggcgctgagcaggtagctggtgccgcccacggccaccagcccgaagaacacgaagacgaagatctcgcccaaccccaggtagccatagggatggcgcccaccggtgtagaaccaggcggccaggatgcaggccacgcccacgatcagcagccaccagtggccggtgaccagcaccgccaccaggccggcgagcgccgagacggcgaagcaggcgaaggcggcgcgcttgacggcggacggattggccgcgccggagccgaccagccgctggggtcccacccggttctcgtcggagccccgcaccccatcggagtagtcattggcgaagttgaccccgatcaccagcgccagcgcgacgaccaggcacagcgcagcgatgccgagcggtgcccgtccgtgccaccaggcgatggccgttccggccaccaccggggagatcgcggtggggaatgtgcgcagccgcgcaccctcgagccattcggacgctgttgccatcggtgttgtgcctcacaagcttggtgccagcaccccgcaccgcctgcggatgatgggtcggtggggatgtcttcggggatggccgtgtccagtgccggggggacgtcgggcgggccgacgtcgatcatgccacgagcgccgcccggtgtgccgcacgggcggacccctagacttggggacatggcgcgtattctcccggtgttggtcctgctggcactgacgatcttcgcggtcgtcgacctgacccagaccgacccctacgacgtgccctatatgcccaagtggatgtggctgctcgtggtgatcttcctgcccgccgtggggccggtggcgtggatcgtgctgagccgcctgcacggcatgaacgatggcagccgcgatggcggcggcgctcccccgcccgacgacaacgaggactggttgcgcaagctgtgaggccacgctgacggcggttttggtggccattggcccgctcggccggtcgttttcccgcgcacccaaggtttcgccccaggaactcgcgtcggaagctgtcctgcgcttggcagcccgctgtgcccgggcctaggctggacccgccgcctttccgcggctcccccttccacctcggtggcatgtgctggcgatggccgtgccgctcgattgccgggcaggactgtgtcccgcaccggccgccccactcgtcgggcatgtcaggagttgatgcgtgagcgtgttgatgcgcgaccgggcgaccgagtcggcgacaaggagcccgcagtgagaaggatgttcgcctcgctggccgtgccgaactaccgcatctacttcaccggcatgacggtgtcgaacatgggccagtggatggcccgcaccgcccagagctggctggtgctcaccgtgctgaccgaccactcggccactgccctgggcaccgtgacggcgctgcagttcctgcccacgctgttcctcatgccgatcgccggcaagctggccgaccgcttccccaagcggcgcatcctcatgttggcccaactggtgggactcatcgacgccgccgtgctgtccaccctggtgatcaccggggtggccgaactgtggcatgtgtacctcatcgcgacgatcgacggcgtcggttcgtcgttcgattcaccggcccgccagagcttcgtctcggaggtggtctcggggcgccagctgtccaatgcgatcagcctcaactccgcgagcttcaacatgacgcgcctgctgggccccggattggccggcgtgctcatcgccatcatcggcaccggaccggtgatcgccgtcaacaccgtgtcgttcgcggcgatgatcatctgcctggcgctgctcaagacccgtgacctggccacgccggccagggcgaaggacggtggcagcatccatgagggactgcgctatgtgcgccgccgccccgacctgatggtgctgttggccatcggcttcgcggtgggcggactgggcttcaacttccagatctccaatgcggtgatgaccaccggcatcttccaccgcggctcggacgccttcggcctgctcgattcgatcatgggcgtcggcgccctggctgcggcgctgtggtcggctgcccgccatgggccgcgcatccgccacatgatcatctccatggccgcctacacggtgctcggcctggtggcggcgttctccaccaactactgggtgttcgccctgctgcaggcgcccatcggactggccacgatcaccgcgctggtcaccgggaacaccctgctgcaatcccacaccagtgcgtccatgcgggggcgggtgctgagcctgtggatgctgatgatcaccggcatcacgccggtggtctcgccggtggtgggccacctgggcgactggctgggcccgcgcgccacggtgatgttcggcgtggtctgcgtcggcatctccaccgtgatcatcacctgggtgatcatgcacaccgacagcctgcgattgcgcttcgcctcgcaccgacgtggctggtggtacctggaacggcgccgggtgaccgacgagatcaccatgccggtgaagtagccgcgctgaagtagccgtgggcccccgaacggggcagactggacgcttgtaggctcatccggacggcccacccgacacgttcgggagaccgtcaaatccgtgggccacgactatggcgcagggcgaccacgcgactcatcgcgtggcaggaaaggggatctcatggcggacgacaactacgacgatctgtacaactcggatgttgtcgcctccgacggcaagaagatcggtggcgtcggccaggtgtacctggatgacaagaccggccagcccacctgggtgactgtgaagaccggcttgttcggcaccaaggagaacttcgtgccgctggtgcatgccgatatcgccaatggcgagatcaaggtgccctatgccgaggaggtcgtcaaggaggcacccaccgtcgatcccgatcgtcacctggacgccgacgaagaggcagacctgtacaagtactacgggatcgagaccgttcccgcacccgggaccgaccgggacgagaccgacacccagcaggccgacgcggaccaggccggcacgggccccgacgccacgcagtgacccccggccggcgccgcgcgccggctcagcaaccgaaatcgacgatctggtcgccgtcgaactcaccctcgggccataccgcccgcacgatgccggccgcggccagcgccttgcggcaacccgggcagggctcgtcggtgatgaaggccgtggcccccttggtgtcgcgggtggcgaacagcagtgcattcatctcggcatggatggcgatgcagaaacccggagtgccgggccggtcgtaatcgcccaggcccgggatctcgtcgtaggacagccgcccccgtgggcaggcaccctcaaggcagtccggacgccccggcgcggccccgttgtagccggtggcaatgatgcgatggtccgggccgaccagcacggcccccacccggcgtcgcgtgcactttgcgcgtgctgccactgcctgggtgatgccgaggaagtattcgtcccagctggggacggtgatttcctgtcccggctcgattgtcgccataggacaagcgtaaccagccccaacagggctagatgtcgatgtcctcataggaacgcggatcgctcttgggctcgaggtgggccgacacccgcaggtccggttccaccttcaccaactcgtcgatcacgtcctcggccaggtcatgggcgcgcttgacgctccactcgtcgggcaccagcacgtgcatctccataaagcgccgattgcccgactcgcgggtgcgcacggcgtggaagtcgatctcgccgtcggcgcggaagcggtcgagcaccccttcgatcttcgcctcgtcctccggcggcagggcgatgtccatcaggccctccgacgagctgcggatcagccgccagccggtccacaggatgttgatgccggccaggatggcgacgatcgggtcgagcacctgcaggttggtgagcgcgaccaggccgacgccgatgatcaccgccaccgaggtgaccacatcggtcatcaggtggcgtccgtcggccgacagggtggccgagcggcgctgcttgccggcgcggatcagcaggaagccgacgccgccgttgatcagcgaggccaccaccgagatcagcaggccgaagcccagctgctcgggcatccgcggattgaggatgcgttcgaccgccgaatagatgatcaccacggcggcgacgaagatcatgatgccctcgaaggccgccgagaagtactcggccttggaatggccgaaggggtgattggaatccggcggcttgatgctcaccttcagcgccaccagcgcgaagatggccgccaccaggttgaccaccgactccagggcatcggacagcaggccgaccgatccggtgagccaggcggcacccgacttcagcacgatggtgaccacggctgcggcgatggacaaccacgcgaacttgctcaggtcaaccggcgccgcatagcgcccggcaatggtctcgcgcatcggcgacgccttctcggtggaggtcacattggtcacacgggccattatcccgcaccctgcatgggcttcgtcccacctgccatcggcgtaccccccacctgccatcggcgtacgccccacctgccatcggcgtacgccggcgcgccccatcgcgcggcccggcacccgataccgaaggcgcggaataccggaggcggggtgccgtcgcgcgtcctcgcgaagttaggcttggaccatgtcccgcccagcatggttcggcgtgctccccttcctggggcgccacgcgtccacacgccaggagacccccgcggtccagggtctggtcatcgccggcggcggtgcccgggcaagcttccagatcggcgccctgcgctatctgtacgagcgcgagcacatcgccccgagcgtgatcaccgccacctcggccggagcgatcctcggctcgctgctggcccagtcgaaggacccggccgagcagctggcgtccctgcgcggcatcgagaagctctggctggccatgacgcagccctcggacatgttcaccgaacgaagctggttcacccagctgaaatcgcatgccgacgccctggacgtgctgcggcaggtggaggagaaggccgaacacgacgatccgggccaccagcccgggttgtggtcgcggtttggttgggggacgcgccaggccgccgcgaagcaggagggcgacgcgaagcaggccggggccaccccgacccaccaggtgacgggcggcgcagccacgggcgcgggcgagtcccccgacgccccggatgcggcgcccaccagcaccgacaacgcgctgagcccccaggagcggaccctggccctggccatgtcggaggaacccggcgaaccgctggggtggacgccgaatgtgttcttccagctcgcggcgggcctgccccagctggggcgcgccagcgccgacctcaccgcggcatggcggggcctggaacgcaatcggtcgctgttcaagcccgggccgatcctgcgtcgcctgctgtcgcgcgacttcttccactccgagcaggtcacctcctcgggaatgacactgcgctgcgccttcgtcggactcaattccggggagctgcgctatatgcgcgaggacgggcacatcgtcgaccgcgatgacaaggtgctggccggaaaccccttcgacatcagcatcggcgtgctcgcctcgtgctcgatccccggggtgttcaagcccgtcgagatgaacggcgaatggtacgtggatggtggcatccgggagaacgtgccggtcgaggaggccgtctccaacttgggggtgacaaggccctatgtgatcgtctcggggccatcggggctgaattacgacgcacaggtgggctccggcgacctgatctcgatcctgttccgcatccagtcgatccagagcgacgagtcagagcgcgacgaggtggcctatgcccgcagttccggggcggtggtgatcgagccggagctgtcggtgcacgagacgatggaattcgaccccggtaccctgcgcatcaaccgcgactacggctggatgcgcgccgccgaggccgtgcatgaggccgacgccgccacccagcaggtgaaccgcgagatcatcgagacgcgcctgcaggcgtggaagcgcgagcgccagatgaagcccggcagcccccacgagttcgatcaggcgatgctcaacgaggtcgggcagttgaagctgcacctgcagtcgctcctgggctcggcggacaagaacctgctgccgcccgatgcccagcaatggtggacccgctcggagggcgacgacgcgccggccgccagttgacggccggacggtgggcgcggcatcggtgcacgacttggtcgggatctggtggcgcgtcgggaccgctgatgggaaagacctgctgacaaggaggaacacagcgccgtgagcagcaccgaccgcggatacgaccacctctacggggcgcgcgtgatcgaccgtgacggcgcgttcgtcggcgacgtggcgcaggtctataccgaccaggtcaacggcgaggccctggcggtcacggtgcgcaccggactgttcggggccaggcgcctcctcgtgccgctcatcaatgccgccgtgggctggcatcgcatcgacgtgccctatctgcgcgcccatgtgaactccgctcccccggccggcaccccggtgcgttccgcccgcgacgcatatccccacctcagcccggtgaccgaggcggagatcgccgcccactatgagctgaccaccctgcgctgagcacacgcgtcgcacccacgccacaccgattgcccaccacgggacgcaagcgatggaccacggacacaccgtggccggctgtgcaaggatgccaagcaaagacttgagaggcgggttgtgatgacgtggtttgctgtggggctcggcctggcagggctgatcctgggaattattgccatcatgcaggcgcggcaggccaatcgggccgcccatgacacgcgggcgaacgtgaacgccgcggtgcaggccgcgttcagcgcggccgccgatgcccagaagagccaccaggagctggtggcccgcagccgcgccgccgtgttgcacgacacccaggacaacgggccggccttccccggcacccaggagcggggacgcttcaactgggtgatggagatcagccgcgacgagaagggcctggtgaccagcctgcgcgccgtcagcgagggatcgcacatcgcccatgacgtcaccttcatcgtgaacagcgacgagcatgccgaacgctccgtgcacttcgacgtgatccgcccgggacgtccggtggacctgcgcgccgagcagaccgtggccatgcaccgcgaccgggtggccgaggccaccaagcagcaggcggccaacaccgccggcatcgccaccgacatgccccgcaagctcggcccgatcgacacgcacctgcggctgagcatcatcgcggtgaccgaggacgggaccccgcaggcatacgtgatcgagcgcacgctgcgcaccaccgaacacggctcggtgctcgtctacgcctgaggcggtggctagctgtacttccccgggaggttgtgaacgggtgaggtagcgaagacctccgggcaggatgtgggttaccacactcactctcctgaccacggaggtcttcgtgactcacgctaacgcacccttgacaccggaagggcgtcgtcgtcttgctgttctcgtcgtggaacagggctggtcgttgcggcgggcggcggaacggttccagtgctcgcccgcgacggtgaagcggtgggccgacaggtaccgggcagggctgccgttggtcgaccgtagttcgaggcccacctcgtcaccgaaccggctttcgcgtaagacggagcatcggatcgtcgcgttgcggttcactcgccggtggggtccgcaccggatcgcgtatcacctgcggttgcaccgttccacggtcggtcgggtgctcgcccgatacaagatgccgaagctgatcaacatcgaccaggccaccgggctgccggttcgccgcccgaagccgacacggtacgaggtcgccgcgccgggccagctcgtgcacgtagatatcaagaaacaaggccggatccccgacggcggcgggtggcgtgcccacggtcgcggatccatgcaggaccgtcacgcgggagtggcccgcgacaaggcagcccgtgccggggcagccggctctcgcggctaccggtatctgcaccacgccgtggacgaccactcccggatcgcgtactcagagatccttgacgacgagcgcaaagagaccgcagcggggttctggacccgcgcgaacgcgttcttcgcaggcctgggcgtcacagtcaccgcggtgatgaccgacaacggttcctgctaccggtcaggcgccttcgctgacgcgctcggcgacgaggtgaagcacaagtggacccggccataccggccgcagaccaacggcaaggtcgagcggttcaaccgaaccctcgccgtcgagtgggcctacgcgaagccctacgccagcgaagccgagcgcgccgcagcctacgagacctggctccatcactacaatcaccacagaccccacaccgggatcggcggccagactccctcagcccgcgttcacaacgtcacggggaagtacagctagcggctgcaccccttgtgacgcaagcatgaggcaacaagccgaacccgcccgcaggggtgttgcacgccctctccccaactgcctgtgcgcctcgcacgcaggttaggcttggggcatcaccatgaccgcccgcagtagcgcgcgccatggattagcgcagcggcgcgagccgcagaaggagcacacatgaatccccgcctcaaggcgctgtccgatgccggagtctcgatctggctcgatgacctctcccgcgcccgcatcacgtccggcggcctggcagaactgatcaaggacagctcggtggtcggcgtcaccaccaacccgacgatcttcgccggtgcactgtccaatggtgccgattacgccgcccagctcaccgagctcggcgatgtgagcaccgccgaggcgatcaagcagctcaccgccaccgatgtgcgcgatgcctgtgacctcttcgcccccatctaccagtcgagcgagggctacgacggccgggtctccatcgaggtggagcccggactggcccacgacaccgaggccaccaccaagcaggccgccgagctgtacaagctcgtcgaccgcgacaatgtgctcatcaagatccccgccacgctggccggcctgcccgccattgaggcgacgatcgccgccggcatctcggtgaacgtgacgctgatcttctcggtggagcgctaccgcaaggtgatggacgcctacatggccggactcgagaaggccgctgccgccggcaaggacctgtcgaagatccactcggtggcatcgttcttcatctcgcgcgtcgacagcgagatcgacaagcgcctgggcgcgctcaaccatcccgagctcgccggcaaggccggtgtggccaacgggctggtggcgttcggcgcctaccaggaggtgttcgcctccgagcgcttccagaagttggccgccaagggtgccaacctgcagcgtccgctgtgggcgtccaccggcaccaagaacgccgcctaccccgacacgctgtatgtcagcgacctggtggcccgtggcgtggtgaacaccatgcccgagaagaccatgcaggcctttgccgaccatggtgagctcggcgagccgatcgatggtcgcgcggccgagggccaggccaccctggacaagatcgctgccgccggcgtgccgctggcagaggtgttcgatcagctcgagaccgagggcgtggacaagttcgtcgcgtcctgggccgaactcgtggaaagcgttgcctcagcaatgaagcgctgatcctctcttcggacgacggcgaagtcccgcgacccgcttgtgctgtgatgcttacgcacggcgccgggtcgcgggactttgccgtcttggatcaggtcgcgccggaaagtcgacgtgggtcgggttcggcgcgaacgttcggcttcggtgtgggtaattattgggcatcgaaccggcttgtcacgagtattcttggcggcagtcatggccgctcaacgacaggtgggatgccggcagccgtgacgggtcatcgatggggatgatgatggacactcagcagtcacacagtcggcaatcgcattcacggatgatgtggcggagggccgtgcccgttgccatgatgggcatggtggcgctcaccgcggcgggaagcctgatcggcacggaatcggcccggggcgagtccgccagccgcaccgccgcgaccactcagcaggcgacctcgcagggcatcacccagtccatcgccgtggacgcctgcgggcagcgggccgagcagacgatcgccaaggccgcaccggccctggcggtgaaggcccatgacacgctcgatacggccacgctccagcgtgatgccgaccgctggcaggtgcagatcggcgtgcggatcggtcagaagcagcacctggcccattgcaccgtgacgggcagcgcgacaagtccggccattgccaacttcgtctactggtgaggttgttgggccccaaaaacctggtcggtggggggtctgcgcgaccggcttgtgctgtgacgcttacgcacggcgccgggtcgcccagaccccccaccttgatccgattcgggaccggatggggaatgggcgaagtgggttgagttgggagcgcatcctcggcttgggcgggggcaaggtctgcgccgggctgggccgggcggcacccttgggttgagcggcaggatggttgatgccgggttggcgtggacactccgtacggccggcgcggactagatttgagggtgtagcacccttaccccaaggagcaccgatatgcgtggcgtcatcatggaatctgccggagttgtccgcgtggaagatcgcgacgacccgaggatcatcgagccgaccgatgcggtgatccgcatcaccaccacctgtatctgcgggtcggacctgtggccctaccgcggcgtcgtcccggtgcaccaccaggtgatgggccacgaatacctgggcgtggtcgagcagatcggttcggcggtcaccacgctccatgtgggtgaccatgtcgtcgggtcgttctgcatctctgacaacacctgcgagatctgccgggccggctaccagtcgcgctgcgtgcacggggaattcgtctcgcaacacattggcacgcaggccgagaaggcccgcatcccctacgccgacggcacgctggtggcgatgcccggcaagcccgatgccgacctcatcccttcgctgatggccacctccgatgtgctcggcaccggctggttcggcgccgtcgccgctggcgtcggcaagggaagcagcgtcgccgtggtgggcgatggtgcggtgggactgatggcggtgctggccgccaagcagctgggcgcggaacggatcattgcgatgtcgcgccatccggaacgccagcagttggcccgcgaatatggggccaccgacatcgtggaggagcgtggcgacgccggcgccgaacggatcaagcagatgaccggcgggctcggcgtccaatgcgccgtcgaggccgtgggcaccgagcagtcgctcatgcaggccgtcgacgcgacccggccgggcgggcatgtcggcttcgtgggcgtcgcgcatgagggtgtcgccctgccgatggacaagatgttcgccgccgaggtgcacctgttcggcgggccggcaccggtgcgccgcttcctgccggagctcatccagctggtgtgggaccgcaagatcaaccccggcaaggtctttgacctgaccctgccgctggagcgcgccgccgagggatacaaggccatggacgagcgcaccgccatcaaggtgctgctcacgctgtgacgcatccatcgtccgggtccgccggccgccggccccgcgttgcgctgatcggcgccggtgccatcggcatggccgtggcgtcgggactgttgcgagccggccgcgcggtggtcgtttgcggcgggcacgcgcccatccaccgcatcgaggtgaccgagcacggcaccacctcggcgtgggcggtggagcacaccgacgaccccacgacgctgggcgacgtcgacacggcgatcgtggccgtcaaggcccaacagaccgattcggcggccgactggctccgcgcggtcgcccggccgcaggtcacggtgctcgtggcccagaacggcgtggaacagcgcgagcgggtggcgccctacctgggccagcccggtgcaggtgcgtccccgacggacgcgccgcaggtggtgccggccatcgtctacctcaatgtcgaacgcctggcgcccgggcgcgcgcgggtgaaccacgtgggcgatgtcgacctggccttcccggtcggggaagctgcccgcgagctggccgatgagctcacccacggcggcctgcgcgtccggttggaggatgatttcgcggcggcggcgtggcgcaagctactcaccaatatctcggcgaatccgctcaccgcactgaccggacgacgtgccgaagtgctgcatgaaccggccatcaggcaggctgccgggcagctcatggccgaggcggtgacggtggcgcaggcagccggcatccacctgacgcatgccgacgcaaccgccgccttggactggctggcgaccatccccggtgacgccaccacctcgatgctctcggatcgcctggccgctcgtccgctggaatatgacgccctcaccggtgccgtggtgcgcacggccgcacgcgtcggcgtcgaggtgcccgccaacaagctgatgctcgccctgctgtcggcgctgccgtccggcgagggcccccaccggcggtaacatcgcgccacaagaccgtctggccggaagaccgccaggtgaccgtctggccaggaggcctagtgaccgtttcgcaccgcgcccgcaacgccgagaccttccatgcgctcgatttcgcccagcgggccgccgacctcgaggcacagggccatcatgtggtgaagctgtcgatcggcgagcccgacttcggtgcgccgccggccgtgctggccgctggccgcgacgccctcgacgggcgtcccctgccctacaccccaccactgggcctacccgagttgcgctctgccctgtccgatttctaccgcgatcgccacggtgtgcaggtgcccgccgagcggatcgccatcacgatgggcgcctcggccgcgctgctgttggccaccgcggcaacaaccgatccgggtgacgaggtgatcctggccgacccctcctatccgtgcaaccgcgagctcgtgcagtcgttcgggggcaccgtcgtcgcgctgcccaccacggcggcgacccgctaccagctcgacgccgacatggtcgagcgggcgtggggcgaccgcacgacctcggtgatgatcgccagtccctcgaatcccaccggcacctcgatcccgttcgacgagctcgccgccatttgcgaactggcccgctcgcggggcggctggcgcatcgtcgacgagatctaccttgagctgtcggacgccagccccgcccataccgtgctcgaggtcgatccggacgcgatcgtcaccggaagcttctcgaagtacttcgggatgaccggttggcggctcggttgggcggtgctgcccccgcagctggtggggccggtggaacggctggccatgaactatttcctgtcggcctccaaccccacccagcaggcggcactggcgtgcttcacccccgagacgctggaggtctgcgaacggcgacgccgtgagctgggcgcccggcgccggcttgtgctcgagggcctggcccgcatcggcctgccggtgcccgtcgtgcccgatggtgcgttctatgtgtacatcgacgtgtccggcaccgggctgggggcctggcagttctgcgagcaggccctcgacgtcgcccatgtggcgctcaccccggggcgtgatttcgggccgaccaccggcgagacccatgtgcgcctgtcgtatgcggcgtcgcgcggcgaactgaacgaggggctctcccggctcggtcacttcctggcgtcacgacgcggctagggcctggcgccacggccgaatccggcgcggtgcccacccctcagcagcaccgggcgcggcacccacccttcaacagcaccgggcgctcaggaccactgcccgttggcagcaccttcccgccaacagcaccgggccctcagtggcggcgtcccgggatcaaccgcgccgaattgaggatgaacgcgctttcgctgcccacatgaacgaccgccgcgagcaccgggccgagcagcccgaaagcggccaggaccatgccgatcacgtcgaccacgatggtgccgacgaagttgaacatcacgatgcgtcgtgcccgccgcgcaatgtgcagggtggcggccaggtcgttcaggtcggagctgatcagcaccacgtctgcactgtcccgggcaatgtcggtgccgctgcccatcgcgatgcccaccgtcgcccgcatcagggcgggcgcgtcgttgacgccgtcccccaccatggccagccggtggccggcggcgcgttcggcgtcgatggcgcgaagcttctcgtcgggcagcagtccggcgcgcacctcggtgatgcccagctcgtcggcaacggcccgggcggtggccggctggtcgccggtgatcatcatcacccgcaagccgcggtggcgcagttcggcgacgacgctgcgcgcggagtcgcgtacctggtcggccagcaggatcgtgccggcatagtgctcgtcgacgctgatgtggacgggcgtggccaccccgtcagctgccgacgccggggcgtcgggcaccaggcgggcgttgccggcggagatcatgcgtccgtcgacctcgacgctgaccccgcgtccgggctggtagtcgaaggactgggccgtgcccggggccacgcctgccgcgcgcacgtgggcggcgatggccctgcccagcggatgttcggaataggcttccgcggcccctgcccaggccaggagttgctgcgtgctgacgccgggcgcagtgcgcacgtcggtgacggtcgggacgccccgggtgagtgtgccggtcttgtcgaagacgacggtgtcgaccacgctgagtgcctcgaggtgtgcaccatccttgacaaaggcccccacctgggcgatgcgggcgatggccgccaggacggcaagtggcgtgccggcggcgatgccacaggcgccggccacgatgatcaccgagatcgtcgccgacaggtcacgggtgaccaggaaggtgacgatcgccccggcgatcgacaggtagaccagccaggccgcgaaccggtccgccatccgctgcacgggcgcccgcgatgactgggcctcgcggaccgccgtcacgatgcgtccatacgacgagttcgcaccgacgcgctcggcgcgcacctccagcgcaccgacctggttgatcgagccggcatagaccgggtcgcccacggcaacgtccaccggcatggactcaccggtgatgcgcgactggtcgagcgtcgaccgccccttgtccaccacaccgtcgaccgggacgcgttcgccgggcccgatcaccagcacctggccgggcgccacgtcgtccagcgcgatgtcgcgggtggtgtgcccctcgcgcagtgtcacggtggtgggcaggaacgacatcagggcggtcagcgcgtcgcggccacggtccatcgacaggtcctcgaggatctcggcggcgagcacgaaggtggtgatgagcagcgaggtggtccattcgccgatgacgccggcggcgatgatcgccagcagcatggacagttccatgctcatccgacgctggcggatgtcgtgccaggcctccaccaccaccggccagcagccaacgacgagcccgatgacggcgagcagcggcacggttggcgagggccagtcgagaccaagggccagggcggcggtgcaggcggcgacgaacagggtgcgggcaaggtcggtgcggtcgatgcgggaccacaggctcgtgcccgcctgctgacggatcgtggtccgggaggtgctgccggtgacggtggtcatgcccgttgcccggggtcggttgcggaggccgtctcggtggcgtccggggcggccggtgcggcggggaccccctcgccgttgagatggtgtggaggtacgccacccaccacgtgttcggcctggaacaccgcctgcgccacgagcttgcgggcgtgttcgtcgatgaggctgtagaagacccgggtgccctcctggcgggcctgcacgatcttcccccagcgcagcttggcgaggtgctgcgacaccgccgtgggcgacttgcggacgcgatcggccaggtcgcccaccgagagttcaccgtcgcgcagggcaaggatgatgcggatgcgggtggcgtccgacagcagggagaacacctccgccgccaggtcgacgtactggctctcgacgttgaacgtgcaagccttcgtatcttcacgcatacgcagatattaaggttagggcaccctcagatgcaaggccctggtgggccacttggacaccacgggcctgccaccggccgtcgggcggacgcgtccccagagcccactgagtgggcacctgtgcggcgtcattcccgcacaactgctcactcagaggaagttgcgggggcccagcgagggtgggtgaccaccaggcggagggatggactcatgaaggcgggccgtcgacccttgcgatcgggcgtcgtggcgggtgcaagtgctcgcagcgacttgctaccccgcaagctacccttgcgctaccccagtacttcgccagtggctcgaatcacgccctgactacgtgttttacagtgcccccacgggggatcgaaccccggacccaaggattaaaagtcccttgctctgccagctgagctatggaggctcgccctattctagtcacaggccgcgccccggaagtgggccgcggatggcgccggacatgccggcgacaacccgcacacgggcacgccggtccgccggcacccgggtcggcgtcgaactcccggcaaccccggacgcctcagtcctgcgaacccaggatccgcccgatgatgcggtcgcgcgaccgagtgaccgcctcggcggccaccggatcatcggagagcattgtccccagggcggcgaacgactccactgccgccaccaccatcgcgtcatccaggtagtcctgcgcgggctcctgaccctccgccaatgcctcgccatgcgtccgcgcgatcacctcggcgatgcgccgcagctgccctcgcgtatccgccagcacctcgtcacgcatctgtggatggcggatggcatacaggttggcctccagcgtcaacagcacctgtcgctggaccgcctcacggtcagcacccgacggcatggatgcacccgtcaggcttgactccaggtcctcgtgcgaccgggccagttcacgctcgatcagggccttgaacagctcctgcttgctggcgaagttcgcatacagcgcccccttggtatagccggcgcgccgcgcgatctccgagacgcccgtgccctcatagcccttctccgcgaacaactgcgccgccgcatcgagcagcgcctcacgcgtcgcctcgatgccccgcgggcgggcggacgagccactgcccagtcgctcggccacatcggtgatctgctcggaggcgcgccgcagcggatcggtgacccgggcgttgatctcgtcgctggtctggttcaccaccgcgctcgacagctgtgacagggcggcactgaggctcgacagcgccgagccgatgtccgagccctcgtccggttcagccatatctcctccttgcacggggtcctcccccggccggttcggcgccagtctatcgggccaaccagccttgacataccgttcagcatctgtctagattgccggtatataccgttcggtatacgacaccatcacagacgatcgacggcaataccgccgacacggagcagcaggatgaacacagtcctcgacgtgcgcggtttgcacaagcacttcggcaagggagcccaccgggtggaggcgaacgcgggggtcaccatggcggcccacgccggccaggtggtgggcctgctcggccacaacggctcggggaagaccaccatggtcaaccagatcgtcggactcacccgacccgattccggcacgatcacggtcggcggcatcgacgcgaccacccacccggcactggcccgacgcctggtgagcctgcaggcgcaggccaatgtgccgatcaccggcctgacgccacgacgtgccatcgaactggtcggacgcatgcgcggcgctcccgcccgggccatgcgctccgggcacgcgaactgatcgaggccctcgacatcgggccctgggccgacgtcgccagccagaaggtctccggcgggatcgcccgcctcaccgccttcgcgatgtgcctggcccatcccgcgcccctggtggtgctcgacgagcccaccaatgacgtggatccggtgcgccgccggctgctgtggacccagatccgccggctggccgacgcaggccatgccgtgctgttggtgacgcacaacgtccgcgagacggaacgcgtcgttgaccggctcgtggtgctcaaccacggtcaggtgctggcccagggcaccccggcgacgctggtgcacgaccgggcgggaatgctcaccctcgaggtggaccaggccccgggacagcctccccactggcccgcgggcatcaccgccaccccggtgggtgaccaccgcagtcgggccgtggtcgcctccgaccgcgcggccgcgctcgtcgcgtgggcagccgacgaactgcgcaccggcgccatcgaacgctacgagctgtcaccggtctcgctggaggacgcctacatcgacctcgtgaccggccaccatcccgccgctgcgggagccgacgccgatcagccggatgccgcgcccctcgacgagcccgacaccaccaccgaatccaccaacgatcccgccgccggtcaggagcacaccgcatgagcaccatcacgtccatccgggccacgcccaactccgccaccaccggaacgaccatggcgccggccggcgtcgcccgctggcgccaattcgggctggtgttccagtggcaactgcggcgcaacctcaccctgatgccgctgtacgtcgtggtgcagctcgtgttgtcggtggccacggtggtcggctacggcctgttgatcggtgatccggcgccagatgccgcgcggtatctggtcaccggggccccgacgatctccctggtcatgctcggcctcgcgatgaccccgcagttcgtggcgcagtcacgcaccgagggcagcctcgactggatgcgggccctgcccatctcgcgtcccgtcttcctcctggccgacctggcggtgtggacgatggtggccctgcccgggctggtcctgtcgatcatcgtcggcgccctgcgcttccacctcgacctgtcgatgagttggctcatcgtgcccgccgccctgctgatcgccctcacctcggcgtcgatcggatatgccattgccaatctgtgtcccccgacgctggcccagctcatcagccaggtgctggtgttcgtgatcctgctgttctcgccgctgagctatccggccgaccggctcccgcagtggggtcaggccgtgcaccactggctgccgcttgagtccatgggcgagatcatgcgccacacgatcctgtccgccgacttcgcggcaccactgtctgcctggctgctgttggctgcctggtgtgcggccgcggtggccggtgcctcctgggccctcgggcggcgaagctgagtaacgcctgaacgccgggccaccgtgagctgcacctgaatcagctgagaatgccctgaaccctcaaacccgcaccctgaacctcaaccttgcgttgaacccgaggggtgcgggttggacgcgcaccccgaccactgcaccccgcggggcgcccctgtgacgaccatggtctgattcacgcctgaaatcactccccgccggggtggagaaccacgtcaacgcggccgtggatcacatcgggcgtcgaaaaacaaccccccatttccccaaccctcaacctgatcctgcactgttgtcgggtttgctgagagccgcctaagctgccgcacgttgtcccagttggggcgtggcctgctgcatacggggccgggaaagacgcctcacctgggatgacgcggaccattggacacggcctttccggccgcgggaaggaccagacgtgaatcccttcgtcaagacggcgcgcgtggctatcacctcgacgctggtggcaggctcgctcgccactgccagcctcgtgtttgcaccacttgcacaggccgattactccccccttgcggccaccgccacggtgaatgtgcgccagggccccgacacctccagctcggtgctggcgacgctctcgtcgggtgacacggtcacccagcggggagccgaacaggacggctggctgccgatcacctacaacggcgccaacgcgtggatccaggcgcagtacgtggcctccaccacggccgccacccagaaggaccagatctccaccgccgagctcacggccgatgcctatgtgcgcaccgcggccaatgcgaacgcctgggtgttgggcacggcccacaccggcgacaaggtgggcatcaccggccaggccagcggcgactacacgccggtgaacttctacggccgcgccggttggatcgccaccaagctgctcagcgcggccgacgcctcggtgacatcgatcaagatcaccaccgccatctcgagcgactacctgtgggtgcgtggtggcgagagcaccgcggcccagtccatcggcatgctctacccgggtgaccgggtggacgtgaccggcgatcccgtcggcgggtgggtgccgatcaacttcaacggcaagaccgccttcgtggccgcgaactactcgcgctatctcactgatcccaccgtggtcacgctgtcgacgaagaccgacgtcaccaacaaggacacggccacctcgacgggcaccgattcctcgacggccggcggctcgaccgccaccaccccgaccaccacggcgccaaccaccaccgctcctgcaaccaagccgacgaccacgcccccggccacgacgcaggccgctgcgtccacgaagtacacgacggccgacgtcaacgtgcgcgtgggacccggcatcgaccagcagccggtgacggtgctcaaggagaactcgcaggtggccgccaccggcaagaccagtggcgactggaccgaggtcagctacgacggcgcctcgcgctggatcagcagccagtacctctcggacaccaagcaggccgaggcacccgccccggcacctgcgcccgatccgacgcccgccggccccaccggaagccggtggaccacggcggcactgaacgcctatggcagctccacccagcccaagccggccaccacggtggtgcccgagggcacccaggtggaactgaccggcaagcaggccgatggacgctcggagtacacgtggaacggcacgacctattggtcggccaccgaatacctcggcaccaatgcgccggccacgaacacctcagcgaacaccgccaagccgggcgccaacgcggtggagacggcgatcaacttcgcgatgtcgaagctcggtggcccctatgtctggggcggcaccggtccggtgggctatgactgctccggactgatgcaggccgcgtacgcggcggccggcgtcaccctgccgcgcgtcacctgggaccaggtgaatgccggcaagcaggtgtcggtcggcgacctgcagccgggcgacctggtgttcttctatgacaacggccacgtgggcatgtacatcggcaacggcaacatcgtcaacgccctcaacgaggacgccggcatcgtggtgaccccgatcagctatatgccgatctcggctgccgtccggatcgcctgagccaccacccccgacggatcggattccccggcaggtcggtagcgcggggatcggtgacgggctcccgggcgggttttaccccccggcccccgaaccggtaccatgatccggcaggtccccatcgtctagcggcctaggaccccaccctttcaaggtggtaacacggattcgaattccgttggggatacgcatggcgggggcccgggccttggtccgggcccttcgtcgggcaaggagtcgggcagcaggcaggccaagttcctcgctttgtgttctgactgcaaggcacgctatagtttcaaagcccgctcaggcaggctgaacaactgaacagcaggacaagaaacatcgaagacaagtcaacacagtgaagacaaatcaacacagtatggccccgtagcgcagttggttagcgcgccgccctgtcacggcggaggtcgtgggttcgagtcccatcggggtcgcttttcgtgacctggccaggtagctcagctggtagtagcgtgcgcctgaaaagtgcaaggtcggcggttcgaccccgcccctggccacatctcgtcgtaaccatcatttcggttgcggcgttttttgttgcccggacgcccctgaggtcctgcggccctcccgcgtccgcatccccggtcgcactgctgtgccggcttggcgctgctcccccggcctgtgtgccctcccggcccttgcggggctcactcttgcaggactcactgcgtggcggcgacgtcgcccttcccgtcggactcctgtggggtgccgggcaccgcaggatcggcggcagcggcgggccgtcccaatcgctgccagtagagcgcgccggccccctcgggacgcacataggcatcaagccagcgatcgatctcatcgaagatgacctcgcgtaccggcgcccgtgacagcatcacatcgtgcacggcgccgcgcaccctcctgatggtcaccaggtcgcccaggtgcagggcggcggccccgatgcgtcgcacgtcgagcacgaggtcggagccgtgcatgtcgtcgttccaggtgcgcgagaaatcgctgcgcgtgctgatgagggtgagcacgggcgtatcgatgtgcaggcccttcgccaccgcgccctggccggccaggatggctcgtccccagccgaagcgcggcacgaacgccgggttcgacttgaagtcggtgtcccagttccattcgccctcgccactgacgtgcagcgcacgcttgtacagccccaggtcggtgatggccagctccatgagtgggttgatcgcggccacggcccccgccaacggcgccatcacccgccagaacaccggcgagccctgcatgtcgagccatggcgagttcaacagcatgccgttgagcaggcccggacgctccgctgcccacagcgcgcccaccagtcccccggtggaatgccccatgaaggtgatcggcaccccgggatggtcgtgcctgatcagctccacgctgtggtcaagctcctggtagtagtcgcgcaggtcggagacatagcccgcgtacaggccctcgtggaggttgcggccatagcggcgcaggtcgaccgcatagaagtcgaagccgtgggcgtcgaaccagtcggccacgtgggcctggaagaagtagtcgtcccagccgtgcaggtagagcactgcgcgctcgtggcgcggggcaccccgacgcaccaacgtggcggtcagtggaccctcgggctcattgtccaggcgcttggcaccggggatcacccaggtgtgtgcctgatagcccgtcaccagcagatcgggaagccatgccgtcatgggtccatcctgcctctcggcgacgcgcgacgcaccatgaccccacccgacgcccgtcccggcatacccagctcccgcaggagttgtgggcacgccggaaccgggcgtcgaaaaatgggttgacggaagtgatgggaacactcgcccgaaggctcaggtgtgcaaggatgcgaccctttgtcgggatcgtgcttcctgcactcgtcccccatcaaccgggtccatgaactggcccggcgctgctcagtcgctcagcggtgcttctcgtcgtcggcagcgcctgcatcggcactgtccgggtcgtactgctttgcgagatccagatagttgtccggaatggcatcgtgaccctgatcatccgggtcatgagcactctcgcctcggagttctcgctccaacgaagcgaagtcagtctgcaccgggcggtacttcaaatcccgggctaccttggtctgcttcgccttttgccggccgcgccccatatgggtcgaccccctcgcttatctcacgcggctctgccgcggcaccaatggttcattcgtgatgccaaggctacccaatggatcgcatccggaccaatctgaccgaacgtttggacgaatttgccgtgacggtgccgctgcgctaggcgccggatccgtgggacgtgccccggaacggccgcctcccggggcagtcggttcccggggtggccggttatcggggcggccggttctcaggacagcgggtgcgaaccggacaactccacggtggccggctgcccgggggtggcactcacctgtccgcatgcccagctgttgaggcccaactcgtcgagcacccgctgcgcggcgtccacctggtcgggcggcagcagggcgaccatgccgacgcccatgttcagggtggcctcgatgtcggcctggctgatgtcgccggtggcctgtacgagctcgaagatgccggccggacgccacgtggcgcggtcgacgtccacccgcatgccctgcggcaccacccgcaccaggttggcggccagcccgccaccggtgatgtggctcatcgcgtgcacgctcacccggtcgagcagcttcatgacctgaccggcatagacatgggtgggttccagcagttcctcgcccagcgtgcgacccaactggggaatcgtcgcgtccagcgacagcccgccctcgtccagcagcacatggcgcaccagcgagtagccgttggagtgcaggccactgctggccatcgccagagccacgtctccgggctgcacccggtcggggcccaggagctcatcggcctccaccacgccggtggttgcgccggcaatgtcgtattcatcgggctccatgagtcccggatgctcggccgtctccccgcccagcagcgcgcagccggccgacacgcacgcgtcggcgatgccctccaccaccgcggctatgcgctcgggcacgacgtggccgcaggcgatgtagtcggtgaggaacaggggctcggcaccgcagacgaccaggtcgtccacgagcatgcccaccaggtcccagccgatcgtgttgtgcacgcccatcgcccgcgcgatcgccaccttggtgccgaccccgtcggtgctggtcgcgagcagcggatggcggtatgcggccagcttcgaggcgtcgaacaggccggcgaacccaccaatgccgcccagcacctcggggcgcttggtgcgggccacatgggccttcatcagctcaacggccgcgtcgccggcctcgatatcgacgcctgcgcgtgcgtaggcggagtcactcatgaagcttccttatggttgatgcgatcgaattcgacattctcatagccgccgcaggccggtgcctcgggggcgtccaggcccatttcggcggactgtcccgggggcacctcgatgggatagatgccatcgaagcaggcgcggcacaggttgtccttgggcacgtgggtggcctggatgaggccctcaaggctcacatagctcagcgagtcggccccgatcgagcggcagatctcgtcgttggtgaggccgggggcgatcagctgcgcacgggtcgcgaagtccagcccgtagaagcacggccactccaccggcggcgatgagatgcgcacatgcacctcggcagcgccggcctcgcgcagcatgcgcacgagctgacgctgggtgttgccgcgcacgatcgaatcgtccacgaccacgagccgcttgccctcgatcacatcgcgcagcggattgagcttgagtcggatgccgaggttgcgcagcgtctggctgggctggatgaaggtgcgtcccacgtagttgttcttcaccagccccatgccgaaggggatgcccgactcggcggcatagccaatggctgccggcacacccgactcgggcaccgggatcaccaggtcggcatcggccggggcctcacgggccaggatcttgcccaccttgacgcgcacattgtggatgcgacgcccggcgatcaccgtgtcgggacgggccacatacacatattcgaagatgcagcccttgggacgggccggggcgaaccgacgcgaacgcaggccggcggcgtcgatcgcgatcatctcgccgggctcgatctcgcgcacgaaggtgccgcccacgatgtcgatcgcggcggtctcggaggcgaccacccaacccgagtggaggcgtccgagcaccaggggacgcaccccctggggatcacgggcggcgaacagcgtgttctcgttcatgaacaccaggctgaaggcgcccaccagcttcggcagcagctccatcgcgacgtcctcgaggggctcgtcgtagctggccatgatggtggtgaccagcgaggtgtcgttggtcgagtccatcgacgacttgtggggcacctcgccacccacgccgacgcgcgccctggcgaaggcctcgagctcgtcggtgttggtcaggttgccgttgtgggccagggccaggccgccgctgggcgtcggcttgaacgtcggctgggcgttcttccacaccgacgcaccggtggtcgaatagcgggtgtggccgatggccagatcgccgcgcagcgagttcagggtggactcgtcgaacacctggctgaccagccccatgtccttgaacaccatgattcgttggccattgctcactgccatgcccgcggactcctggccgcggtgctgcagggcatacaggccgtagtagacgagcttcgacacctgctcgccgggagcgaagactccgaagacaccgcactcgtcgtgcgggacgtcgtcatgctcagcatcggtttgggactcagggctcaccgggcagcccggacgcaactccacgcgctcagcctaccgtgctcgtcggcacgcgccccaaagcccagagcggacaagacgtggccgcgggccgccatgacggcccgcggcggtgccggagacctcagcgcatgtagaccgacgcgccattaccaccggtgcaggtggtgatcgcccgggcgtccatattgcagttcatggtgtaggtctgcccggtcgtcgagctggtggcctgcacggtggcggcctggccgaagctgcccgaacgcagataggcatcggccacggcggtggcgaagtcgcaggtggtggccgagttggcggcgatgctggcaccgcacatcttggcggcacccgccgggaaatcagccaggttggagacgcccgagggcgttgcggacgcactggcggtggccgatgcgctcggccgtgccgaggtggccgtcggggccgcgctcgtggtggtcggggtgggcgtggccgtcgcactgggcgtgggggtggccgaggccaccgggctggaactggggctcggggtcgacgacgacttgagcaccccgtcgaaggcgcccagcagccaggcgacgaccagcgcggtgatgatcagcaggtgcaccgcccaggtgaagatgaagctcaaccagtaggtggcgcgcgggaatccgcgatcgtgggcccgccctgcgctcaccgcggcggcgatcgccccgaagggccccaggaagagggtcaccaggatcgtgggaatgcggctgggacgcttgtcgtcggggtcgggatcgtcctcgttcaccaccgggatcggggcggtgtcgcccatgcccggcggcgggtagcccgggtagctgccgtccggttggccgccccggtacgcgccgccgtactggttcgcgccatagggattcgccccgccccgatagggatcgttccgatacggatcgccggcggtcgggtcgtcagacatgccgcttccttcctgtcgccactgtcctgctgccgccacggccctgctgtggcggccgagctgttcctcccgggttgggaaaggttgcctccgggtggggccattccgtcccaaacctacggcatgggggcgtcgcggtcgcgttccgcggcgggccgggcacgattcgccggccccacgaacccaccggatcccccgcccagcgctcgtgcgtcccgccggcaggcatgcgcatcgtgggccgcgattgccccactaggctaagcagcatgatcgcgatcgtcaccgtcaccggtctggatcacacgggaatcgtcgctgctgtgagcacgcgactgtgtgagctgggcatcaacatcctcaacatcacccagaccatcatgggcgactacttcaccatgatcatgcagtgcgagctcgacgagtcgcgccacggcatcggcgaggttgccgacgagctgcgtcgcaccggtgagtcgacgcaggtggacgtgcgcgtgcagtccgaggccatcttccacgcgatgcacgagctgtaagccatggacaccacacacgacatcctcgagaccatcgagatgatcgaggacaaccgcctcgatatccgcaccgtgaccatgggcatctcgctgctcgactgtgccgaccacgaccccagggtggcccagcgcaagatctacgaccgcatcacccaccaggcacgcgacctggtgaccacggcccagggcattgagaccgagttgggcatcccgatcatcaacaagcgcatcacgatcacgccgatgtcgatcgtcgccgccgggtcggaggtggacgactacaccggcttcgccgagaccctcgaccgcgccgccaaggaagtgggcgtcgacttcgtcggcggcttctcggcgctcatgtcgaagtcaagcaccgccgcggaccgccgcctgctcgactcgatccccgccgccctggcggccaccgacgtggtctgttcgtcgatcaacatcggctcgaccaaggccggcatcaatatgacggcggtggcacgcaccggagaggtgatccaggagctcgcgcaggccaccgacggcatcggctgctccaagttcgtggtcttctgcaatgcggtgggcgacaatccgttcatggccggcggcttccacggcgtggaggagggcgactgctgcatcaacgtgggcgtctcgggccccggcgtggtgaagcgggccctcgacaaggtgcccgaggccacctggggcgagatgtcggagaccatcaagaaggccgccttcaagatcaccaggatgggccagctggtgggcacgatggccgccgagcggctcaacgtcgacttcggcatcgtcgacctgtcgctggcacccacccccgccgtgggcgattccgtggcggagatcatcgagacgatgggcgtcggcacggtgggcggccatggcaccacggccgcgctcgcgctgctcaacgacgccgtgaagaagggcgggctgatggcctgctcgcacgtcggtgggctgtcgggatcgttcatcccggtcagcgaggacgccgccatgatcgatgcggtgcggtcgggttcgctgagccttgccaagttggaggcgatgaccgcaatctgctcggtggggctggacatgatcgccattccgggcgacaccccggcgtcgaccatctcgggcatcatcgccgacgaggccgcgatcggcatgatgaacaacaagaccaccgccgtgcgcgtgatccccgtgccgggcgctactgtcggcgacgagatcgacttcggcggcctgatgggccgtgcaccggtgatggcggtcaacccgtcgagcgccgaacacctgatcagccgcggcggacgccttccggcgccggtgcacagcttccgcagctgacatggccgcccggttgatccagcactcccccgatccaggaagcaggcattcggtcccgatgctcatcgcgatggcaggactccgcgcaaccggcaagagcgagctcgccgaacagctggccacccgcatgaaggcggtgctggtgcaggtggacgccctggaggaggccatcatcggggccggcatctggcgcaatgaggccaccaccacggccgcctatgacgcggcggcggcagtggcgcgggcgaacctgcgcaatggcctcgatgtgatcgtcgatgccgccaactacaaggccgagacccgtgccctgtgggtgggcctggccgatgagctgcacgtggaccacatgttcctggtgaccacctgctccgaccaggccgagcaccagcgtcgcatcgaacaccaccgcgccaacggtgacggcagtcagctcacctgggagcaggtgatcgagcgcaacatgaagaccgccttctggggcgacgagccgcgactggccatcgacacctcgaaggggctcgatgtggaccacgtgatggccctggtggccagcttcgccagcgacaaccagccggtgcgcatcagcaagggcccccgacgcggcgcgcggcgggcccaggcctgatcacccgccggtcccggcgtcccgggtctggcgcgtttccgggacggggacgtcggcgttcagctcaggccgatgatggtgccgtccgcctcgatgtccatgccggccgccgcgggatgcctgggcaggcccggcatcgtcatgatgttgccggtgaaggccaccacgaacccggccccggcccgcaccgacagctcacgcaccgtgatctcgaatccggtgggggcacccagcaggtgcggatcgtcgctgaaggagtactgggtcttggcgatgcacaccggcagcccgccgaagccggccttggtgagccgggccagctgagattccgccagcgaggtgaagtgcaccgagtcggcccggtagatctcgcgggccacccgctcgatgctggcccgcagtccctgctcgggacggtacaggggctggaagcgggccggctgcgtgggatgctcgcacatctcgaccaccgcgttggccagctcgatgccgccgtccgcacccttggcgaagacctctgagtcgaccaccctgacgcccatcgccgtgcagcgttcgcgtaccagggccagctcggcctcggtatcggcggggaagcggttgatggccaccagcaccggcacgccgtagctgcgcaggttctccacgtggcgttccaggttggccatcccccggcccagggcgtccaggtcctcggttcccagctccttgacgccctgcccgccgttgtacttcagggctcgcacggtggcgaccagcaccgacccgtcgggctggaagccggccgagggacagacgatgtcgaagaacttctcggcgcccaggtcggcaccgaagccggcctcggtgatcgtgtagtcgcccagcttgagtgccatgcgggtggccagcaccgagttgcagccgtgcgcgatgttggcgaaggggccgccgtgcacgatggcgggggtgttgtcgatggtctgcaccaggttgggcttgatggcgtccttcagcagcagggccatggcaccggtggcctccagctgttcggcggtgacggcgtcgaagtcgccgttgtaggaggtgacgatgcgggccaggcgggccttcaggtcgtccatgccggcggtgaggcacaggatggccatcacctcgcaggccacggtgatgtcgaagccgctctcgcggggcacgccgtcggaacgcttgcccagcccgatgacgatgttgcgcagggcgcggtcgttcatgtcgagcacccgacgcagttccacgcgctgggagtcgatgcccagggggttgccctggtgcagggagttgtcgagcagggcacacaacaggttgttggcggccccgatcgcctccatgtcgccggtgaactgcaggttgaggtcgtccatcggcagcacctgggcgtagccgcccccggccgcgccgcccttgatgccgaacacggggcccagggagggttcgcggatggtggtgatggccttctttcccagccggttcagggccatcgacaggccgatgttcgtggtggtcttcccctcgccggcaggcgtggggttgatggccgtgacgagcaccagcttgccgtcgggacgatcggcgatgcgatcgagcaacgacaatgacagctttgccttgtcgcgcccgtaggggtcatattcctcgggctggatgcccagcgcctcagccacctgcgagatgggcttgagcgttgcttccattgcgatctcaacatcggacttcatcgcgtatgtccccctggttcgccgtcaaccggtcagcaccaatcgatatgcctgattctcgtggatcggcggggtgcgggcaaccgcacgacgccgattggggcggtggcgcgccacgagcggagcgcggttatcgctgcccgctggtcccggggcgatccgcccgaccctccgcagggccgctgggaccccgcttcggaccgtgcgagggggcgcccgggtgggcgtcacgccagtcggacagcgcctgttcggcgtccaacagggagatcaccacgcgcggctgggtggccggattcaggttggcgtccctgatgcgctcgttgagggcgtcgatgatctggcgtgcctgctgttcggtgggcacattggccagcgtgcgggcgatccgggccttctcacgccgtagttgcaggggtgggggcaggatggcggacagatcctcgcgctccaggcgctcctggatccagctcttctgctcgccgggacgccccagcttcaccggcttgccgcgcaaggggttgtcggcgaaatcgccacgctccaacgcctcgcggatcagccggtctggatagctctcgtagcgaggggtgaagtcctcggccatcagcgggccaggcggtcgagcagcagcgcctccgacgccgcagccttgcgccaatcgcccaggtgcagcgactcgtcgatgccgtgcatccgcgaatgcgggtcgctgacggcggtacccaggatcgtcgcctgcgggaaggcccgctggaagctggcgatcatgccgatggatccgccggtgccgttcagcaccggttcggtgccccatgccgtggcgaaggccgcccgtgcctcctcggcaatggggccctcgaagggaaggctcgccggctcccccgcctcggcgttcgacagggtcaccctggcgccccacggggcgtgggagcgcagatgggcgaacagcttctcccgggcattctcggcggtgtcgccgggtgccacgcgcaggctcacccgcgcgcttgcggagggaatgagcacattggagctgacggcgatcggcgtggtgtcgagcccgatcaccgagatggacggcttgttccacatgcggtcgacgaaggagtcgtcgccgatgaattccacgccgtcgagcacgccggtctccgcacgcatccgcgcgtcggggtattcgagctgctcgggggcatggccgctgaccaggccctcgacggcgacattgccgcgctcgtcgtgcagcgtcgccatcaggcggcacagtgcggtgagcgcatcgggtgcgacaccgccgtattcgccggaatggatcgcgtggtcgagggtgctcacctgcaccacgcagtcgacgacgccgcgcagcgaggtggtgaaggccggcgtgccgacctcccagttcccgcagtcgcagatgaggtaggcatcggcctccagctcgtcggtgtacttgtcgagcagcgcgtcgaggctcggcgagccgatctcctcctcgccctcgaacagcaccgtgacgccgaccggcggcttgcccttgaaggcccgcaatgccgccaggtgcacgcccagcccgcccttgtcgtcggcggtaccgcgtccgtacaggcgtccgtcacgttcgacggcgacgaacggatcggaggtccaggcgtcgaggtccccggtgggctgcacgtcgtagtgggagtacaggcagacggtgggcttgccctcgggtgccgggtagtgcgccagcacggcgggcttgccgccggcctcgatgatgcgcacatcgtcccaacccagcatcttcaggtaaccgaccagttgatcggccatcgcggtgatgtcgccggcatgggcagcctgcgaactcaccgacgggatgcgcaccatggaccgcaggtcgtcgagcacgcccggcagcacctcgcgaacctggtcgatgacttcctgatcacggcctgacgccattgttctatgccccctgcattgcttccggaatggttgactgccactgctggcgcagctcgtcgagctgcacggtgaagaatccgcgcgcctccagcagctggtcgccgcgcacctcaccgagctcgcggacgggcacgccggcgtcggcacacagcgtagtgaactcggccaccgactgcggcggcagcgagaccaccgcccgcgcctgcgtctcactgaacagctcggcgcacgggtcgaggtcagtgggcagggtgaacgacacgccatggttgccgtgcaggcacgactccacgagcgccaccgccaggccgccctccgacaggtcgtgggcgctggagaccagctgctgcttggcggcagcctgcagcaccttgcccagcgcgatctcggcgtcgaagtcggggaacgggggcaggccgccgaggtggtggccgtgcatcacgtcctcccaggcgctgccgccgagttcctgcttggtgtcgccgagcagcagcacggtgtcacccgcatgggcgaagccctggcggatgcgcaggcgcacatcatcgatgacgccgagcatgcccaccagcggcgtcggcaggatgttgatgccgtcggtctggttgtagaagctcacattgccgccggtgaccggcacgccgagcaccttgcagccgtcgaccaggcccttgatggcctcggtgaactgccacatcacctccgggtcctcgggggaaccgaagttgaggcagtcggtgatggcgacgggctgggcgccggtggtggccacattgcggtagctctccgacagggccagttgcgcgccgaaatagggattgaggtaggcgtagcgcccgttcgcgtccatcgacagggcgacgcccaggttggtctgctcgtcgacgcggatcatgccggagtcctcgggctgcgagagcaccgagttgccacgcacatagcggtcgtactggctggtggcccagctcttgtcggccaggttggggctggtggccaccgcgacgacggcctcggccagcgccgcaccgtcatggccgcggggaaggttgttggcgtggtcggcctgcaccccgtccagccattcgggacgcagctgcgggcggtcgtagcgcggggcgtcgacggccaccgtgttgggatcgacgtcgacgatggtctcgccgtgccagtcgatgatcaggcggtcgtcctcggtgacctcaccgacgacggtggcctggacgtcccacttgccgcagatcgccatgaacgcgtcgacgtcggcgggttcgacgacggccatcatgcgctcctgcgactcgctcatgaggatttcctcgggcgtcatcgtgggatcgcgcagcggcaccaggtcgagttcgcagtgcatgccgccatcgccggcggaggccagctcggaggtggcgcagctgatgccggccgcgccgaagtcctgcagcgcggtgaccacgccggcatggaacagctccagggtgcactcgatgagcagcttctccatgaaggggtcgcccacctgcacgctgggtcgcttggcggggccgtccgcctcgaaggtctccgaggcgagcaccgaggcaccaccgatgccgtcggcgccggtggccgcaccgtagaggatcaccttgttgcccgagccggtggccttggcgaagtgcaggtcctcatggcgcatgacgcccacgcacagggcgttgaccagggggttgccgtagtagctggagtcgaagaccagttcgccgccgatgttcggcaggcccaggcagttgccgtagccgccgacgcccgccacgatgccgggcagggtgcgcttggtatcggccgagtgcagcggaccgaagcgcagggcgtccatacaggcgacgggccgcgcgcccatcgccatgatgtcgcgcacgatgccgccgacgccggttgccgcgccctgatagggctcgacatagctggggtggttgtgcgattcggccttgaaggtgatcgcatatccctgcccgatgtccaccgcaccggcgttgtcgccgatgccggccaacagcgggccgcgcggggtggtctgcggcagttcggagaaccgcttcaggtggatcttgctggacttgtaactgcagtgttccgaccacatcaccgagtacatggccagctctgcgcctgtcggacgacgatccagcaggtcgcgaattctcgcgtattcgtctgccttgaggccaagggcctcccagggctgcacaacatcgggggtcgtacgggcgttctcaacggtgtcaaccacggggacaaatctacctgctgtgcgcacaagccggttcgcacgcccgccgggggcgtcccgggcgcgatccgggcgtgcccgcagccccatggaatcgggcctttccgactgggcggttagttgtgtgtaagtgggcacttgtgcgggaatgacgccgcacaagtgcccactcaacgacgtttcggcggtatccaggggcacggcgcccgcgccgtcacccccgagtccggcccgcaggcccagaacccgctcatccactagatgggcagttgtgcgggaatgacgccgcacaggtgcccacctaacgaggaatccggcgggaaccggggacgaacccggcgccccggggccgggacagcagcaggacggggcacgggaggcccgcgcatggctggtcaccgcacgagtcggccgtcactatgctgagttcatggtggacccgggggattctgaaggcacggtgctgtgccttgacgctggacagaccatcacgcgcacccaattccgcaggaacgggacggtgatcggcgagtcggagcatgccggcgtgctgaccgaccgtcccctgctgccgcagctggccaccgcggtgaggtcgggcctgcatgccgctgacagcaccgttgacgttgcggccatcggcgtctcgggcctggtggacaacgccgacgccagcgaattgctggacatgctggccggcaccggcattcgcgaggtgctgctggcacacgattcgaccaccagctacctaggcgcgatcggtgacgagctgggggcggtggtggcagccggcaccggttcggtgaccctggccgtgggcgccacccgcaccgcacgcgtcgatggctggggctatctgatcggcgacgccggatccggcttttggatcggtcgcgcggccctcgaccgggccatgcaggcccatgacggacgcggggcacccacggcgctgaccgccgtggtgcgacgcgacttcgacgacctcgaggaggcctacctcgagttgcaggccgacgagctgaaggtgagtcgcatcgccggctatgcacagacggtggccgagctggcgggcaccgacatggtctgccggcgcatcagcgaggaagccgcggatctgctggcgcatgccgtgttcgccgggttgcgccgcgtgggccaggccgagcgcgaggacccgatggtgggcgcggtgggcaatgccttccgcaacacggtgctgcgcgatcgcttcgagcaggtgctgcgcgaccagctacccaagctcaggttcgtcgagggccggggcaatggcctggatggctgctaccggatgacgctggtggcccccgactctgcactgcgccaacgcatcaaccgggcgaccgccagcgagcgcccccaggactgaacgagccccgaccaggacatgcccggtcggggcccttcatcgcggcgtccagtgcggggacgcatcattgtgcggcgccttgccaattcaggactggttgccaattcaaggccggtggccaattgcgggccggtggccgatgacggattgacggccaatcagaggtcggtgggaccgctctcgagtgcccgcaggtattcgcggcggtggcgtccgggctgcaccccggtgggaccggcggtgaagatgcgctgcacctgttgttgcatatcggtcatctggcgcatgaggtcggtgatttcgctgacccgctggcgcatatcgtccaattccttctccaggccgacgatgcgtcgaatgccattcaggttgatgccctcttcctgcgacaggcgctggatgaggcgcaagcgcgtgacatcgcgcggcgaatagcgtcgcccacgtcccttggcacgcttcggcacgaccagacccatccggtcgtagccacgtagcgtctgcggatgcatgcccgtcaggttggcggccaccgacaccgtgaagatggcggcgtcgggatcgatcacctggggcaaccagggctcactcattgcgcacctcctgcgctaggcctcatggggcgccgggccaacggcccacacccatacgtcagggcgcgtccatacgtcacgacgcgtccacatcaggactcatcgctggtcgccgcatcacgaggattcggctcattgaccacgccggcataggccttaagagcctcggtggccttcttgttcaggtgggacggaacggacacctcgatggtaaccagcaggtcaccatgaccgcccttggccttggacacgcccttgccgcgcacgcggaaggtgcgccccgagggggtgcccgccgggatgcgcagccgcaccgaaccggatgtcagtgtcggcaccgagatctccgtgcccagcgcggcctccgggaaggtgaccggcaccttgacggtgagattgtcgccggaacggccgaacaccctgtcgggagccacttgcaccttcacgtacaggtcgccgcggggccccccgttctcgccgctcgcgcccttgccacgcaccctgatgcgttgcccgtcggtgacgccggcgggaatgcggatctgcatggtgtgcgtaccctcggcacgccccgagccgtggcaggcatggcacgggtgatcaacgatcaggccacgcccatggcaggtcgggcagggcacggtggtgccgttcatcgacacctgcacccccgatccctcacaggtcgggcagacccgtggcatagtgcccggctccgcgccggtgccatggcacacgggacaggggtcgtcactgagcatgcgcagcttcacggtggtgccttccacggcgtccctgaagctgatcgaggcctgaccttccacatccgccccgcgccgcggcgtcgcgttgacgcgcgtgctggtgccggtgccgccctgaccgaacagaccacccaggatgtcacccaggcctcctgcgcccatcgagccggcaccgcccatgttgcggaacaggtcattgacgttgacacccggcccgccgccctgggcgctgcgattgaaccggaagccaccgggaccacccggcccgcccagagagcgcgtctcgtcgtattccttgcgcttcgctggatcactcagaacatcattggcctcggacgcctgcttgaaacgctcctcggccttcttgtcaccgggatgctgatcaggatggttctcgcgcgcaatcttgcggaaggccttcttgatctgctcgggcttggcgttcttgggcacgcccaacaccttgtaatagtccttctccagataatccttggtgctcatcggcgccccctttcagtgttgtggtcttattgaattgtggtgcgacaggtgccgccggcgcctatgcgtcgggcgccttgtcgtcaccggatgcattatcgtcctggtctgcgatggtgtcgtcaccggcgggctcgccattgggaaccgacaccgcgacgcgtgccggacggatcaggctgtcgcccacccgcacgcctttctgcatgacctcgtggatgcgcatctcgccggtgcccggggtgggcacttggtacatggcctcatggaagcgcggatcgaactcttcgccggcctgcccgaagatcaccaggccatgcttggcggccaagctctccagctcatcggccaccagcttgaagccgccggtcagctcaccatgagcctcggcctggtgaatcgcgtccagcacggggatcaggtcgcgcaccaccgactcgacgcccttcgcacgcgccacgtcacggtcacgatcgacccgcttcttgtagttcacatattcggcctgcaggcgctgcaggtcctcggtgcgctcagcggccagggctttcgcctgacccaaggcatcgtgggcggcattggcgcgggcgccggcagctgcttccttggcggtgccatcggccgtcttggcgagaaactcttccggggtgaggttcgagaagtcgccctcgggctgctcgtcgccgttgccctcggctggcttgtccgtcatatctgtgaatactcctgtccgcgacccgaatcgcggaatcgctagcgtggtgtcccaccccgtcaaggtagtgggacggatgcccgtgtgccgccctggtcggggcggcacacgggcggatggcagagccacgtgccctcaggcgcggaccccaccatggcaactcacttggagtcgtccttcttgtcctcatcatcgacgatctcagcatcgacgacatcgtcgtcattgctggaggcctcgcccgaggcgggggcaccctgctcaccggccgcggcacctgccgcctgctgctgctgggatgcctcgtataccgcctggcccatcgccgacgccttctggttcaggtcgtccatggcggccttcacctcatcgtcgttatcggtgcccttgagggcctccttcaacttcgcaacggcctcgacgaccggctgcttgacgtcgtcggacagcttgtcgccgttctcatcgagcaacttgtcggtgcgcagcgtcagcatgtctgcctcattgcgcatgtcaaccgactcgcgacgcttcttatcggcctcctcgttggcctcggcgtccttcaccatcttgtcgatctcgtccttgctcagggccgaccctccggtgacagtcatcgactgctccttgccggtggcggtgtccttcgcgtagacgtgcacgatcccattggcgtcgatatcgaaggtgacctcgatctgcgggacgccgcggggcgccggcatgatgccggtgagctcgaagttgccgagcgacttgttgtcgcgggcgaactcacgctcaccctggtacacctggatcatcaccgacggctggttgtcctcggccgtggtgaagatctccgacttcttggtggggatcgtggtgttgcgctcgatgatcttggtcatcacgccgcccttggtctcaatgcccaggctcagcggggtgacgtcgagcagcagcacatccttgacctcgcccttcagtacgccggcctgcaggctggcgcccagggccacgacctcatcggggttcaccgaacggttgggctccttgccgcctgacagttccttgaccagatcctgcacagcaggcatccgcgtggagccaccgaccaagatgatctcgtcgatgccgctgacgccgatcttggcgtccttcagcacggcattgaagggggtcttgcagcgatcaagcaggtcctgggtcatgcgctggaactcagcgcggctcagggtttcctcaaggtgcaacggacccgcctgcgtggccgtgatgtacggaatgttgatgtcggtggtctgcgtctgcgagagctcgatcttggcatgctcggcagcctcctgcagacgctgcagggccatcttgtccttctcgagcgagacgccgttcttggccttgaactgctcgatcagccagttgacgatgcgctggtcccagtcatcgccgcccagcttcgggtcgcccttggtggccttgacctcgaagacgccgtcggagatgtccaacagcgagacgtcgaaggtaccgccgccgaggtcgaagaccaacacggtctgttccttttcggccttgtcgagtccgtaggcgagcgcggccgcggtgggctcattgatgatgcggtcaaccttcaggcccgcgatctcgccggcctccttggtggcctggcgttcggcgtcgccgaagtatgccggcacggtgatgacggcgtcggtgaccggctcacccaagtacgcctccgcgtccctcttcagcttctgcagcacgaagccgctgatctgctggggcttgtattccttgtcgtcgatcttcgtggtccacgacgtccccatatgacgcttcaccgaacgaatggtgcgctcgggattggtgacggcctggcgcttggcgacgtcgccgaccaggacctctccgttcttcgcgaaggcaaccaccgacggggtggtgcgcgaaccctcagcgttcggaatgaccgtcggctcgccgccctcaagaacggcgataaccgagttcgtagtgccgaggtcgatacctactgcacgagccatttgtgatgtcctccagtgtgttcggacggtgtgggcaccgccctgattgtccaaccggtggttgcccaccgggtcgggcccggacgccgcggctgcttcacagcgccccgcccgtaagcctttggttgtcctgccgatgttgctcaggtgaccgccggtctcccgacgacccccttgagcttacatcactcaagttagttcttgagtccacttggctcaaccgacatcagggggtggactattccctcccggaccgaaaaattgcctcaactgtcgacatttctcacactgcgcaggtccacgccagcctgcgacaccgctcccccggcatggctgtggccggggacgaaccccggccacagactccccctcaggtgcaccggctgtagttcactcgcccttgcggtgcacctcgtgtcccccgaactggccacgcagcgcggccaccatctgcatgctcgggctcgtttcctgccgcgaggagaaccgcgcgaacagcgaggcggccaacaccggcatcggcacggcccgggccaccgcctcatccagcgtccagcgaccctcacccgagtcggtggtgtaatcgctgacgccctcgagccccgggttctcctccagcgccttgaccagcaggtcaagcagccaggagcgcaccacggtgccgcgggtccaggccttgaagcagcccggcacatcggtcaccaggtcgtcggccgcctccagcagctcccagccctcggcataggcgtgcatcagcccgtactcgatgccattgtgggccatcttcgcgtagtggccggcgccgatgcgccccgcatgcacgaagccctcatcgcggggcccctcgggacgcagcgcatcgaaaatcggcatggcacgggccacgtcggcgtcatcgccgccgaccatcaggccatagccgttgtccagcccccagaccccgcccgagacgccacagtcgaggtagtggatgcccttgtcacccagggtctcggcgtccggccggtcatcggtgtagtgcgaattgccaccgtcgatcaccaggtcgccgggtgccagcaacccggccagttccgcgatgaccgcgcgggtggccgcgcccgccggcaccatcacccagaccacccgcggcagctcaagcgcgtcgacgagcgccgggaggtccgccacctgagacacctgcggatcgcggtcgtagccgatcacatcgtgacccgcgcggctgatccgctcggccatgttgcggcccatccgtccgagcccgataagtccaagttgcacttctactccaatcattgggggcacgtcaggcgtgccgccgacgcaggtcgttcaacgcgcatcggcgttccgccgacgcaggtcattcggggcgcatcagcgttccgccgacgcaggtggtgctgcaagcgcgccgggcggttcccgacgcgccacatcacaggacgatcaggctcacccccatcacgcaggcgaggccggtcaccgaaatcaccgtctccatcaacgaccaggtcttgaaggtctgccccaccgtcatgccgaagtattccttgaccatccagaagcccgcgtcattgacgtggctgaggaacaccgagccggcaccgatcgccagcaccatcaaggaaccctccactggcggcagggagccgaccatcggcgccatgatgcccgcggcggtgatcgtggcaacggtcgccgagcccgtggccaggcgaatcagcacggccatcaaccaggccgcgaacagggggtgcaggttggcgtcggcaaggccctggccgatcatcttggcgatgccggagtcgaccagcgtctgcttgaatccgccaccggcgcccacgatcagcaggatgccggccaccgggccgaatgccgagccgacgagcttgttcatcatgtcgcgggtgcgtcccagcaggtagccgaagacgaacatcgcgaagatcgccgtgatcaacagggcaatcagtggggtgcccaggaagacgaggaagcgtcccgccgtggtcttgtcgatgtgggccagctccgccacggtgcgggccagcatcagcaccaccggcagcagcacggccatgatcgagatcgcgaagctcggcttgcgatcgtcggcatgcaccgcgtcggcttccttctgcacatagtcgtcaccagcggtgatcggcacccacttggccatcaccctgcccagcagcgggcccgagatgatcaacacgggaatggcgatcagcaggccgaggcccatcgtcatgccgatattggcgttcagcgcgctgatcgcgatcagcgggccggggtgcgggggcaccaggccgtgcagcaccgacaggccggccaacgccgggatgcccagcaggatcaccggcagcttggcacggtgggcggcatacatcaccacggggatcaggatgaccacgccgacctcgaagaacagcgggatgcccaccacgaaggcgatcaacgccatggcccagggcaatcgcttcaccggggtcttgtcgaggatggtgtcgacgatcacgtcggcgccgcccgaggagatcagcagggtgccgatgatcgaacccatcacgatcaacaggcccacgtcggcgaaagtggatccgacgcccttggtgaagctggcgaacatgtcggtgtacgacacgccggcggacacggccatcaccgccgagccgcccatcaacgccaggaagggatgcaccttgagccagacgatcagcaccacgatcgtggcgatgccggccagtgcggccaggatcagatggagagtcataaggggttctcctgctcactcggcagcagttggacgacggaccgaacgggcgtcgcgacgcgggctgctggccccacgacgacggccttgggcggaccgatacctgatggcggcccggatgacctccacatgcacgcgcgccatggcaggcatctccttcccggaggacttccttgttcgtccgagatggttgtgcttcggccgcgccgtgcggctcgaccgtgtgacgtcggggggataaaacgacaccacaaaggtactacgtaccggttacacatgcgactagtctttgaaatagggtgaccccaacccgctgcccttattcgtgcacggacatggaggagcgcagtgagcgaagaagcgaccaaccaaccgaagttcatgagcgtcgaccgcgagctcggaatcgagatcatcgacggcgtctgggcggtgggcgaggcacgggccctcgaggagatccaggaacgcttcaacgtctcgcgcacggtggccagggaggcggcccgccaactcgaggcgatgggactggcccgaccacgacgccggctcggcctggtggcccagccccaggagaactggcgcatgctgcatccggtgctcatcaactggcgactgcactcgacccagaggatggcccagatgcgcgcggtggtgcaactgcgccaggccgtcgaaccgatggccgcggccaatgccgcccgcatcgccccgattcccgaccggggacgcctgatgtccctggcggccgagatgcgccagttctccgacgccaacgacgaggaatcgttcatcgactgcgacaacgaattccatgaggtgatgctggcctgcagcggcaacgaattgttcgccgccctgggcgagctggtcggcatcgtcattcgggcgcgcgttgatttcgacgccccgcatccggcccgccagcccaccatcatcgcccatgaggcggtcgccgaggccatcttcaagggcgacgcggattgcgcgcacgccgccatgtcgaccctgctgtccgacgcctgccacgacttctcaggggtcaacatcagcctgccgacgcccaccgaggcacccaccacgccgcgtcagcgcccggccgccacgaaatagcgtcccactacgacggccccacggctctgcccggacgcagcagtccgcgccccgatggcccggtgcgtccccatcccccgataacgctgcattcgggcgccggacccaccgtgggggcgatttctgccgggaatgcgtccccgttatactgctgcggacaacctcgcccgtggtgcaggaagtcggttcaagccgacacggtcgcgccactgtgaacatttcggagcaaatgccccgcgatgagagtcaggaactggccacggacgagcctttcaagcgcgggacgcacgatcccgagaaaggaatgccgtgcatatcgcagaaggcgttctaccacccgtccaatgcgccatctggttcgcagcagccgcacccttcgtggtgcatggcgccgtccaggtggtcaagcagatcaagcaccatccggagaaccggctgctgctggccacggcgggcgcctgcaccttcctcctgagctccatcaagctgcccagcgtcaccggctccagctcgcaccccaccggcaccggcgtcggcgcggtgttgttcaagccgccggtgatggccttcatgggcctcatcgtgctgatcttccaggccctgctgctggcccacggcggcatcaccacgctgggtgcgaacaccttctcgatggccatcgtcggcccctgggtgggctacggcgcctatgtgctcaacaagaagctcggcggcccattggcgctgggcatcttcctggccatgttcctgtcggacctgtccacctactgcgtgacgagcttccagctcgccttcgcctaccccgatccgtccagcggcgtgctcggcgcggccgagaagttcctgggcatcttcgccatctcgcagatcccgctgtcggtggccgagggcatcctgggcatcctgctgttccgcttcctgttcaaggtggccggcccgcagctgcaggccctgggcgtgcggctcggcaacaagcgcaccgccaacgccgaggttccggaggtggcacatgtctgaggcaaccatcaccaacccgggcgccggcgcccccaacccgaccacgcccgcttcggacaccagcggccacggcctgttcgccgccgaccgcaagtgggtcaccccggtgctcgtcgtggcactcgtggtgatcttcgtcggcagcctgatcatcggcggcatccgcacagccgggcaggacgagaccttcgtcggcaccgactcggcagccaccgaggccgccgaggaagccggtgccaagccgtggttccagccgctgttcgagccggccggcgaggtggaatcgggcctgttcgccatccaggccgccatcggttcgggcatcatcttctactgcctgggccgcatgtcgggcaagaaggccgcccgcaagcaggaggccgcgatcggcgtgaccgcggcagcagccgacgcgtcaacctccccggccgcagccatctcccccgacggatccacaccgggaccgacggcccccggatcacggaacgcctgacacatgagtggcctccacatcggagcgctcgacgacgccgcctggggcagcccctggcggcgtcgtcgcgtcggggagaaggtcgcctgctccatggggctcgtgctcaccgcactgctcgcgcccacctggccgggcaccctgctggtggccgtggccgccatcgccctgatcgtgggcgccgcccgcatccggccacgggtgctgctggcggccatgagcgcacccatcgtcttcctcatcctcggtgcgatctcggtgctgttcagcgtcggcgccgcaccggccgatgcctggtggcatgccgccttcctgtcggtggggcccacctcggtggcccaggccgcccggctgttcgcccacggcctgtcgggcacgctggcggtgatggtgctggccaccaccaccccgatggtcgacctgctcacctggctgcgtcgcttccgggtgcccgacccgctgctcgagatcgcctcgctcacctaccggctgctgttcgtgctggccgagaccaccgccaatgtgctggccgcgcaacgctgccggctcggggacaacccggtgggccggtggaacggcctgtcgcggcgctggcacaacacggccgctgccgtgggggccatcggcctgcgcgcctgggaccgctcgtcgcggctcaccgaggggctggcccatcgtggcttcgagacctccttggtgacgctgcccgtgccccgggtcgcctcgccgcgcctgatcaccgccaccgtcgtggtgctggccgcaatctggtcgatcagcctggtggtggcccgatgagcgccctgctggccgcccacgacctcgtggccggcttccccgatcgtccccgcgtgctcgacacggtgaacctcgccatcggccgcggcacccggctcgcgctgctcggcgccaacggctcgggcaagaccaccctgctcagctgcctggcgggctcgctgaagcccaccggcggtgccgtcgaacgcgatggcgcccccatcgactggggacgcaagggactgcgcgagcaccgccgccatgtgcagatggtgctgcaggaccccgatgaccagctgttcagcgccgacgtctcacaggacgtgtcgttcggtccgatgaacctggggttggagcccgacgaggtgcatgcccgggtgcgtgaggccctcacgctgctgggcgccgaccacctggccgaacgcgccacccaccagctgtcctacggcgaacgcaagcgcgtcgccaccgccggcgccgtggcgatgcgtcccgatgtgctcatgctcgatgagccgaccgccggactcgatccgctgggcgtgcaccagatgcgtgacgcgctcgaccggctcaccgacgccggcacgaccatcgtcatggccacccacgatgtggcgctggccctcgactgggccgacgaggtcgctatcgtctgtgacgcgacggtgcaccagggagctcccgaggccctgctctccgacgccgacctggtggcgcgcagccatctggacacgccctggccgttggcacttgccgccgccctgggactgtccgcccgtccacgcaacctcgacgaggcggtggccgcactggctcccgcgctcggcgagttcgccgccacgcacgacgccgccgcatccgtgcccggatccgacgacaccaccaacaccgatgaggaaacccgatgaccaccacactgttgcccggcactgtcaccctcgtcggcgccgggcccggcgaccctgaactcgtcaccgtggccggcctgcgggccgtgcagcaggccgaggtgatcctctacgaccggctcgccccgcaggacctgctgtcggaggcgtccgacgacgccgaactcgtgccggtcggcaagatcccgcgcggccactatgtgccccaggaggagatcaaccaactgctcgtcgcgcacgcccgcgagggccgcaaggtggtgcgcctcaagggtggcgactcgttcgtcttcgggcgtggcggcgaggaatggcaggcctgcgccgaggccggcatcccggtgcgcgtgatcccgggagtctcctcggccaccgcgggcccggcgctggccggcatcccgctgacccatcgccacctggtgcaggggttcaccgtcgtgtcggggcatgtatcgcccagcgacgagcgctccgaggtgccatggcgccaactcgccaaggaccggctcacgctggtgatcctgatgggcgtggcccatatgcgcgacatcgcgccggaattgatggccggcgggctgcctgccgacacccccgtgcgcgtggtgagcaatgcgagcctggccagccaggaatcgtggcgcaccacgctgggcgatgccgtggccgacatggacgcgcaccacgtgcgtccgcccgcgctggtggtggtgggtaccctggccggcgtcgacctgtcgcatcccgaccatcgcgcgcccagcgaccactgagtcccggccggccgccgggcacctgctgatcgatcggcgtggcctgcggccgtgagacactgccgaacgtgtttgacctcgatcggatagccgccgggctgccggttggtgggcgcctggacgagctcgccgcggccctcacggcgccggatgcgcgcctggtggtgcaggcccctccgggctcgggcaagaccaccgtggtgccgcccctggccgcgcatcaccatgccgggcgcgtcgtggtcacccaaccccggcgcatcgccgcccgcgcggcggcccaccgactcgccgaactgtccggcaccgccctgggccgcgaggtcggcttcacggtgcgcggggagtcacgccgatcggatgccacgcgcgtcgaattcgtgaccaccggcgtgctggtcaaccgcgtattgcgtgaccccgagctcgccggggtgggcacggtgatcctcgacgaggtgcacgagcgtcgcctggacaccgacctggcgttcgcgatggtgcatgacgtcgccgacctgcgtgacgacctggcactgatcgcgatgtcggccaccctggacgcgcagcgctgggcgtccctgctgggcaccggcacgccggcaccggtggtggacgtgcccggggcgctgttcccgctaagcgtcgaatgggccccgccaccctccggcgtgttgcccacctatggcggccacctggacaatgccttcgccgcccacctggcacgggtcacggccgcgaccctggcgcaacaccacgccgccgacggcgcgcccgcctcggcgctggtcttcgtgcccggggcccgcgacgtcgaccagctgatcgggctgctgcgtcacgagccgggccttgcgggcgacatcgaggtcgccggactgtacggctcgatggctgcccgcgagcaggacgccgtgctgcgtggcggtggacggccccgggtgatcgtctccacggccgtcgccgagtcgagcctgaccgtgccgggggtgcgcatcgtggtggacgccggcctgtcgcgcgagccccgcctggacgccacgcgcggcgtcaccggactggtgacagtgcgtgaatcgcgggccagcgccgaccagcgggccgggcgggcggcgcggctggggccgggagtcgcggtgcgctgcttcgcccgtgacgaatgggccggcatgagtgccgaggccaccgcggaggcgtcggtcagtgacctggccggcgccgcgctgaccctggcgtgttggggttcggcgcgcggccagggcatgacgctgcccgatcccctgccctccgacgcgctggaccgggccatcgccacgctgcgggggctaggcgcgctggatgcccgcgaacggcccaccgcgctggggcggcggctgtcgacactgccgttggacccgcgtctgggacgcgccctgctggtgggggccgcccgcatcggcccgtcccgcgccgggaaggtgatggcgatgctcgccagcgacgagcgggtgcccgatggcgacctgatggtgcagtggcgggcgctgtcgtcgggacgctcccccgcggcgaggcgctggcgccacgaggccacccggctcgagcggatggcgcgtggctccgatgggcgtcctggttccgcgtccggggcgccactttccgaccaggctgcagtgggcctgttggcggcgttggcccgccctgactggatcgcacgacgccgcgagcccggcgggcgtgcctatctcaccgcctcgggtaccggcgtcgacctgctgcgcgagtcgtcgctggtgcactcggagtggttggcgatcagcgagctgacaaggctcgatacccgcaccggcccggcgcgggcggcccatgcgtcgggcagcctggtgcgggcggccaccgcgctgggggaacagaccgcgttggatgccggcgccgacctgctcgacgagcaggacaccgcgacgtgggacccggcgaccggccgggtgcagacgcgacgtcaacgcgccctgggagcgatcgtgttgtcgagcacgcccgttcggacgcgtgctgcggcggccgccggggcggcgctcgcggcgttgccccaggtgggcctcggcatcgatgagccgggcctgctgcgctggtcggacggcgccgtgggcctgcgcaatcggctggcgttcctgcactcggtggacgcttccgcctggcccgatgtgagccaacctgcgctggtggcacgtgccgacacctggctggccaggcccctgcacaccacgggctccaccttcgacgtggacgtgaccacggcgctgcgcacgctgttggactggcggcaactcgccgagctcgaccgggccgcccccgagcggctgcccgtgccgaccggttcgcaggtgcgggtgcgctatcccagccccgagtcgggcgagcagaagcccgtgctggccgtgaagctccaggaatgcttcggcatgcgcaccaccccgcgggtgagcggggtgccggtgctgatggaactgctgagccccgcacgtcgtccgctggcgatcactgacgacctcgagtcgttctgggtgaacgtctatccccaggtgcgcgcggagaaccgtcgccgctatgccaagcatccctggcccgaggatccactcacggcgcctccccgccgaggcaccacgcgttccggacgctgagcccaccgcgacaccacccgtcccggcgctgggcccgccgcgggccacgcggtcatgacccctacccagcacgctctaagctgttctgcatgccgaagcaccatggccgcgcccggggcgcaggaaaccagaatccgcgtcggctcctcaccacgctgggcacatccacactgggcacatggacccgccaggcccgacgtcacgcccagcggctgaacatccctctcccggcagccctgggtggcatcgccggctatgcgttggcccacaccacctcgctgttgccgcgcactcccctgttccagggtgtggtggccgcggtcaatgcgagcgtcggctacgagctgggcatgatggccgccgacgtggccgcactacggagggccccgaaggccacacccggcgtgaacccagcgcccaccacggtatcccccatcgtcccgaatcccctgaccggcgtcccgacaccccgtccgggcaacggctcgctgcgttccggcctggccgccgcagccctcggcgcgacgctgatcggcgtcccactggccgcattgcgaagccagcggcgcactgccgagttctgtcaggtgcccggcccccgcgtgcgctgggcccccgcgtcggcagcggccagcgtcgcgatcctggggttcttcaccctgtgctggcgcatcaccgagatgctgctcgactggctcagccaccacctcggccagcgcctcgcctggcggctggccgcccgggccctggcgacgctcgtggtgctggccggcaccgccgtgctgttcgaccaggtgatcctgcgcggcatccgcctggccggacgcaccgtggccgaccgccttgaccattccacccccgccggcgtcacccagcccgatcgcgccgtgcggtcgggaagcccgagctcgggtgagacctgggactcattgggcctgcagggcaagcgcttcgtctcgggcggacctgacgccgcacgcatcgcccgggtgctcggatcaccggcccaggacccggtgcgcgtctatgcggcgctggacggacgcggcctggccggcatcgcccgggcagtgctcgacgagatggaccgcaccaacgcctggcagcgccgggtgatcagcatcgtcaccaccaccggacgcggcaacgccaacgagtggagcgcctccgcgttggagtacctgctggccggcgattgctgcaccatcgccacgcagtattcgggactgcccagcgccatcaccctgttcaccagccgcgagcagccggtggcggccacccgcgtgctcttcgaggccgtgcaggggcggctcgccgcgatgccggccaacgaacgtccgcagctgttcctggccggcgaatcgctgggcgcctacggctccaacggcatcttcaccgacgtggacgacatggtggcccacatcgacggggccctgtggctgggcaccccgaacttcacgcccatgcaccgcgaactcacccgctcacgcgacgccggctcgtcggcggtggcacccgtggtcgaccggggacgccacatgcgcttcgccggacgcagcgcacagttgagcgccgacgaggcgggcaggcccctggacgcctggcagagcccccggatcgcctacctgcagaacgagaccgacccggtggtctggtggggcacccggctgctgtaccggcgtcccgaatggctggccgagcgtcgtcccgccaccaccccgatgggccggatgcactggttccccttcgtcaccttctggcaggtgtgcgccgacatgcccgtctgccgcaatgtgcccgagggcttcggccacaagtaccacgccagccagatcacccccgcgtgggcgggggtgctgggccgtgacccgcgcgccgactactccgccatcgagcaggcgctcatcgaggacgtgacgatcccgccgatcaaggtgttcggcatctgacggcccattcggcgcgggcgcaccttggacggggcccggacggccgtggggcctatttgtcggcgaaggtgatgcgcatccggtggtgatcggggtcctcgatctcgtcgaggatgcccaccgcgaagttctccgcgctcacgcgctgcccggcgggctcatcgatgcccagcacatagtgcccggtgcgttgtccgggctcgatcagcggcgagggcgacaccacgagccagtcgagggccggcggcgaggcctggtagcgctcgagcatggagatcccccacgtggaattgcgcatcgccgcctccgggaagccgggacgatcgcgcaggtaggtgccgccgaccttcagcgagcccgcgccacccacgacgatgatccgcgcactgggcacggcgtcgatcagccgctggtgggcgtgcaggttcacctcgatcggctccacccgcgagcggtctggcgggatcgagatgatgaccacatcggacgcgttcgccagctcctccaccgccggagtatcggtgaagtccatcgccacggcggtggtgccggggatggcccggccgttgcgcgtgacggccgtcacctcgtggcccctggccatggcctcgtcgacgagcctgctgcccaccatgccggtggccccgaaaatcgcgatcttcatggtgcctacttgtccgccagggtgatgcgcatccgatggtgcgcaggtgcctcgatctcgtcgaggatgccgacggcgaagtcctgcgtggtgatgtggtcacccaccggggaatcggtgccgaccacatactgtccggtgcgctcccccgggccgatctcgggcgagggcgacacgatcagccagtcgacgcccaccggggcctgccggtagcgcttgagcagctcaatgccccacgttgcctcgcgacggtaggcatcggggaatccgggtgtgtcgcgcagcggtacgccatcgacgagcagcgagccggcgccgccgaccaccacgatgcgggtgtcgggggcggcatcgatcaggcgctggtgggcgtccaggttcacttcgatcggctcatcggcggtgcgcgagggcggcacggagatgacggtgacgtcggcctggttggccagctcgaccaccgccggggtgtcgtcgaaattggcctgtgccggcgtcgtgtcggcaacggtcttgccgctgtgcgagacggccgtcacctggtggcccctgcgcagtgcctccgcggtgatctggctgccgacgtggccggtggccccgaagatcgtgatcctcatgtgtttccccttgccgggcactggttcatgcccccgatgcccacgcgtgcgtgggtgcgtgatgattggtgtttcaacgctatgccgcgaggggccggcggctcaatggatcggcgatgtttcgcacacagcccacaacctgctgcggcggcagccacaacgcttccggggcccgccggtaccaactggttgaggttcagcggggctcgccggccccgccagatgtcggggccgggctcaatggaaataggggatgatcagccacagcccgaaggcgagcatcgcgaagcagaccaccatcatggcgtaggcacccacccgcatggccggggccggggtgccggcatgggcccgtgcccgcgacaggtcgagcagcagcgcggccgtggacacggcggcgaccaccaccacggtgccgatcagggtgacgacgctgaccagcgcgagtgccccccagtcgatgttcatcggccggccccgctgcccgccatccgcggatttgaaccatcggtgccctcgcggtggtgcccgccgggcttctcggcggcgggcttgagcaggtcggcgacggtggcctgcaccggaaccggcgccggggtggccgcagccacttcgggctcggggctcagccgcaccgtgacctcgtgggaatcgttgacgttcgtgtggtcgaccttggtgtggcgggcgacggccagcaccacgatggcagcgccgatgagcatcacgagcacgccgaccaggccgacggcacccttggaggcggcgaacgaggcgaccgccccgaccacgccggcggcggggagggtgagcagccaggcaattcccatgcgtcccgcaacgccccagtgcacctcggcgccgcgacgcccgatgccggagccgaggatggcccccgagcagacgtgggtggtcgacagtccgaagcccaggtggctggacgccaggatggccacggtggaggcggtctcggagcagaatccctgcgcgggcttgatctccaccaggcccttgcccagggtgcgcatgatgcgccagccacccgaataggtgcccagtccgatggcgcagccggccagcgcgatcacccaccagtgcgggtgggtgcccgactgctggtacccggcgccgatcagcaccagggtgatgatgcccatcgtcttctggccatcgctggtgccgtgggccagcgccaccatcgacgcggacagccgctggccgtggcggaagatgcgcgaggcgtgatgggcggtgggtgaggtgatcttgtacgagatccaggtggacagcgcggcggcgatgccggcgaccacgggcgcgacgagtgcgggcaggatgatcttcgacacgacgacgccccagtgcacgcccgccatgccggcggtgacgagcacggcgccgatcagcccaccgaacatggcgtgcgacgagctggagggcagtcccaccagccaggtgaccaggttccagacgatggccccggccagtccggccagcaccgtctgcggattcaccagtgagttgtcgacgatgcccgagctgatggtcttggccacctcggtggacaggcaggcgcccaccacattgagcacggcggcgacggcgacggcctgacgggccccgaaggcgccggtggcgaccgatgttgccatcgcattggccgagtcatggaagccgttggtgaagtcgaagacgagggccaccaccaccacgatgatcacgagcgtcagcgtcatcagtgaccacgcccccaaaaacagccagctgggactgcagtcatgcgcacctcaagcgattacggggggcaccgcgggggtgcccgatcggggacgtttcgaaggcctgcaataacaagtaaagcacgcgcgctcgccagcagaaaagccggtccgcccgttcgccgaggctcgcagcgaacacgccgccgccccgcacgtctgctctggctcaccgcccggcgaacaggcccagccagccgcccagcaccggccacagcatcatcaggctccacgcggtgaaggcccccaccacaaggacgaacacggcgatccacccgccccgcggcaggtgggtgagcatgccgagcaccaccgggtcctggccggggtcgcccgagcgggccacattgagcagttggcgccaggcacccaacaccaggaaggcgccgaccccgcagaccagcgcggccaccagctggacgtcgccgaaccaccaggccgcgaggtcgccggcgagcaccaccagcagcgccagcaccgtgaaggccgacctggcccgcaccaacgcgccgagcgccatgagcgccagcagcaccaggggcccccatcccgccagggccgcccagatgcccaccgcaccgaccaccgccggcgccggatagccggccgccgtggtgagcacccggccgatgccggtgggcctgcccagtgtgctgacctcgcccgacatgtcgggatgcaccacgaagcgctgccacttgcgtccgctcagcaggccgacgacggcatggcccagctcatgcacgatggtcaccgcaatgcgggtccagcgccacaccggacgcaccacgacggccaccagcgcggcccccacggcagccgcgatccaccagccctcgtcggggtggacgccggcgacgctcgcccgcaggtgcgcgcccagctgcgcggcgaagcccgaccagtccatggccccattcttaccgggccggggccctccgtcgggtgacaactgcgcccggtgacaccggatcggacccccgtcgcggctctcagaccatgcgttgacaaggggattcgccgtccgcgaagagtccgcccattacgcgatggcacattgtccttacactgcgtgcagactacggtgagttagcccccaggtttccggagccatgttcatggcaggacgccacaacacaagtacgcagacgtatgccactgatagggggaaccagtaatgagtcacttgctcttcactcgcccatgttccatgtgtgggccacgcgccgacatccaccgcgcaacacccaccccacgacaacgacaccgaggactggcgtcgttgcagtggggcggtgaaggggcatgaccgctgtcgtcagccataacggcggcgcgtccgacctggtactccccgtgctcgaactgagctcggaggtgacgtcggccacggaggccatcatctaccgtcaccaactcacgccggcctggtggcaggtgctcgccaccgtgctcgacaccgcccacaccgtgcccgacatcgcccggcgactcaaccgcacccgccagagcgtgcaacgcatcgccgacatcctcgtcgacaacgaatgggcgcgctgggacgccaatcccaagcatcgacgctcccaactgctggcctccacgctgtcgggacgccaggctgccgccgagctggagggcggcctgcaggactgggccgattcggtgggcgagggcctgaccgtggccgagatggaccagttccgctcgctgctcgaccgcatcctgcacggctcgcgcgactaccgggcacacaaccgctgagtgagaagggcccgggtctggaggaccactgggggccgaatcgccggaccagggcccgcgtggcgcgctgcaatggggctgcacgccacgtgggcccgccccagccgggcgcagcagggatactggtccgcggaccccagtcggggtgaaggtcagtcggggcgcacttcagtcgggcgcacggtgagcgtctggatatgcccgtgctgatccaccgtggcgtcatcatggcccgacagcgcgaagacatggccgtcggcggcacgtccggcaaccgcccagtcgacgcgaacacggtccgggccggtcatctcggtgttccacacatggtgcaactccacgttgcgggcgaagaaggtgcggaagaagtccttcagcccttcctcgccattggcgatctcgccacgtgctgattccagttccgcgtcgcgggcgaacaggcccagcagctcgtcaaggtcccgttggttctgcccggcggtgttcgacagctcgaagtagcggttgagcgtggtgattcccgggttggtggctgcggccattgcgtgctcctcgtcgatgggtgacggatcccgccgcccctcggtcacgctaccccggccccggtcacgtccgcagacgccgataacggcgtctcgaccgggtgcgacaatgagccggtgagcgtcgcaatcctgagctttgtcgtggccatgctgctgatcgcggcctcagaccggctggccgagcacaccggcgtcgtcgcgccggtcgccctgctggccctgggcatcatcgtcggcttcaccccgtgggtgcccgacatcagcgtcgacccgcagatgatcgtcgcggtgatcctgcctcccctgctgtacgccaccgcgacctccatgccgacgatggacttccggcgcaacctgacccccatcgcggtgctgtcggtgttgttggtggccgtatcggccgtggtgctcgggttcatcttcgagaagatggtgcccggcatcggcctggccgtcggtatcgcactgggcgccgtggtgagccccaccgacgcggtggccacctcgatcgtgcgacgccagggcgtgtccaaccggctggtgaccgtgctcgagggcgagggcctgatcaacgatgcatcggccctggtgatcatgtcgtccgcgctggccgccgtggcagcccatgtgacggccggcgaggtgatcggacacttcgcccaggaggtcatcatcgcgctgctgatcggttggctggccggcgaggtgatggtgtgggtgcgcgcccgggtgggcagcgtcaccgcagacacggtgctgtcgttggtgacccccttcgtggcctaccttcccgccaatgcgctgcatggctcggggctggtggccgccgtcatcgccggcctggtggtgggacgcgaggcccccgagcgcctgcattccagccaccgcgtggcggccgggcagatgtgggcgaccctgcagctggtgctcgaatccaccgtcttcggcctgatggggatccaattgcccggaatcctgcacgatgtggcccgcggcgagctgcacttcaagctcgccgcgatcgtcgccggcgtcggcctggtggcgaccatcgtggtgcgcgcggtgatggtggttccgctggtgctgggctcgtcgcggcgcaacaaccggcgcgaacagaagcgcccgcgcctcgagctgatgaacgagatggcgggcaagatgaccgagcaggtcaagaacggccccaccaccgtgagccgtggcggacgctcgatgacggtcacccccgagcgcgcaagcactttccgacaccgcgtctggcgggccctggccgacatcgactacttcaccgaacagtcgttcggcccccgcgagggcgcggtgatcgtgtggtcgggcatgcgcggcgccgtgacgctggccgccgcccagatgctgcccgaatcgacgccgcaccgcagcttcctcatcctggtcgccgctctgctggccagcgcctccttggcgatccagggcagcacgctgagcctgttggtgcggctggtgaagcccacgaagacgcgtccggtcacccgcgcggaactgcgcgacatctatgggcggatgcgcgaggccgcgcaggacgtgccggtgcccccgaagctgatggccatgctcaacgcccagggcgaagacgactccgaggtgaccggcgacatccgtggcccggccgtctcgctggcatggaacctgaccagccggatgcgcgaatcgggggtgaccctcacccaggcgcagcgcaaccaggtgacggccctgtcgttccgctacgccctggacgtgatcgccgcgcagcgcaaggccctgctggccgtgcgcgacaccgggaagttccgtccccaggccctggacgacgtgttcgccacactcgatgccgacgagatggccctggagctgcatgccgggccgctgctcacccagggcatcgaggaacccggtgcccccgccgatcaggacccggacgaccgcttggctccgctggagtgaggctcccccccgggatgaacctcccccggaatgaacttggcacaagtggttgaggaattaactacttgggtggatggttgtcgtaggtgacacaggccggcatgcctggatgggcccggcacgaacaaggagaggtcaacgatgacgaaggtcaacgcttcgaatgccatgctgcaggtgctcaaggactggggagtcgacaccatctacgggttgccgggcgggtcgttcgattcgaccatgaacgccatccacgacttccgcgacgacatccgctacatcggagtgcgccatgaggaagtcggtgcgttggcggccgtcgccgaggcaaagctcaccggcaagatcgccgtcaccttcggctcggccggcccgggtgcagcgcacctgctcaacggcctgtacgacgccaagacggacaacatccctgtgctcgcgctcattggccaggtgccgaccgcgatgatgaacaccgacttcttccaggagctcaacgagaacccgatgttcgccgatgtgtcggtgtatgcgcgcaccgtcaccaccgccgagcagctgccgcaggtggttgacaccgcgatccgcactgcctactccaagcgtggcgtcgccgtggtgatcatccccaaggacctcggctgggcaccgatcgaggacaactatgtctcctcggcgaacgcggccacgcccgccgactggaacctggccgcccgcgatgccgacgtggcccgcgccctcgacctgatcaacgaggcccagcgtccgatcctctactacggccagggcgccaagggtgccggcgacgagatccgtgcgctgtcggagctgttggggttgccgatggtgtccacctacctgggcaagggcatcgtggccgacgacgatcccggctacatgctgccgaccggacgcgtggccggcaagccgggcgtcgacgtgggcaagacggccgatctggtgctgttcgccgggtcgaactatgagttcggtggccacatgttctcccccaccgccaccttcatcgacgtcaacctcgagacctcggtgatcggtgctcgccacgcggcggcgctgggcgtgcgtgccgatgcgccgaccttcctgcgtcagctgttggagctggcgcgccagcagggcgatgcccgcaacgaccatgccgactggctggccgccgccaagcaggacaaggcggagtggaccacctgggtggatgcgaaggccgccgatgaccgcgagccgattcgcattgagccgatctatgccgagatcaacaagcacgccaagcctgatgcgatcttcggcatcgacgtgggcaatgtgaacatctccagcggacgcttcctgaagctgggcggcgacaagcggatggtcacctcgcccctgtacgcaacgatgggcttcggcctgccggccggtatcgcggcggcgctgaagtaccagggccgccagatctggacgctgtcgggcgacggtggcttcgcgatggtggtgcaggacctggccacccaggcggcgcacaacctgccggtgatcaacatcgtgttcaccaacaagtcgttgggttatatcgaggccgagcaggacgacacccgccagccgcactccggtgtggcactgaccgatgtcgacttcgccaaggtggccgaggcgttcggcgtgaagggctacaccgtgcgcacgctggcggagctgcgccgggtgctcgacgaggtatcggacacgaaggtgccggtggtcatcgacatcaaggtgaccaatgaccggatgctgccggtggaggcctaccccgtgaaccgcgccgatcgtcctgacttcgacgacttcgctgcccactacgaggcgacgccgctgcgtcccttcggtgagatcctcgccgggcacgggattcacctgggctgacctgccacgccgaagtcaccaacgtggtgacggacggcgtcgtgttatggcgcgtgaacaaggaccccggttctcccatggtgaggggaaccggggtccttccctgtacgtgtgcgatgaacgctggccggtggggtgcggctatgacgacggcagcgaatcaagcagcgctcggatcgctgcggcgtcgtggtcgctgaccggctggccctggtgcaccatggaggcgatctgctgcccggtatcgatcacgtcctcaacaccgggatcgatattcatcatgtccgtgaccatcaggaaggtctggagcatcctcaggtcgccactgcgctcatcggaggtggcgggcagtgtcagcaggcgcggtgtgagccggcgaatcgtccgcaacgtccgcaaccgcttctccctggtggcgcggcggcgttcccacgacggcaggaacaatgccaccgagacggccagcacctcggcaaatccggtgacccattcggccagtgacccgatctccatgtgtcctcccccggggatcgccaccggcgaccccatcccgatgtttgcaccctgtgacggccggggtcgcgcctggtcagcgcgcgaaaccacctacggtgaccgaggaggttttcgaacccggcttcgcggcgcggaaccgcctgcgccgacccggccgacccaacggcgacgtctagccgggggctcggtagcccatccagcccgtgggccccgttgcgctgagcccagcaggaactagcggcccatgggggcctgcggcggcgggaactgctcgggccggaagggctgctgcacaggcggcgggggaaatgcctgggccggcggcgtggccggctgctgcgccgggctgcgatagggcgcataaccgctcaacttggagggcatgccggtgtcgggcggcaccggcatcgtgaacgtcggggacgggaccggtgattgctccccacccggctgccccgcgtcggggaccccgctgccgggcgccccggcaggcgtcccaacttcaggtgcgccggcaggcgccccagctgcgggtgccaccgtctcgctgggcggggccggcggctcgtcgtactgcctgtccacctccggggaatcgaccggctggggatcggcatgtggcgtcggggcgctttccgctgccaccacgctggccgcctcactgagcgccatgacgtgctcccggatcgccgtgatgtcgtggggctgggcgttgcggcggcattcctcggccacccggccgatccgctcgatctgctcggcggtcgtctcgatggtgctgcccacctgcggcatcagctcacgcaggtcgtcggacagctcgcgtccggcggccatcgtctgccagctcgccaacagggtgcggggaatcgacaccgcctgggccatctcgttgatgtcggaggccaccttcgccgccagttgcgcattaccctgcacggcaccggccgtctcagccacaccctgcgacagcgcccggcacagcaacacgatgcccggcgcggcaagctgccagtccggcgtctggtcaatgagttcgacggtgaaatagcccacctgatcgcaatgcagcctggccagggcgatacggaagcgcgtggcggcgcagctggcgcgcagctgctccacctcgtcggtgaccttcgccaccagtgtcgacagctccagggtcatcgccgaccacaggtcgagccctgccatgatcggtgagaatccctcggcccgctgcttggcctgctggatgcgctcacgcagtgcggcatcggcatgggagtgctcggccaattcgcccgacagcgtcgacagctgggtggcgagctcgtcgaggcgacccagcaggctcacccagtcgtccagctcctcggtgagccgacgctgatgcacggccatgtcggccagccggcccaccgcccacggacgctgcggcaccgtcgcaccggccgcgatccgcgcctgcacctcggcgggcaccaccgtctgcatgaaggccgtgtaatcggggatgccggccgccgtgagctgcttggcgagcacgccgagcccctgcgccgcggcggcgggagcgcccagcccggccgcctcccattcgagttccaggtggcgcaccgtgccatagatactgtcggcggcacccaacagatcggccctctccgggcgtgtgcgcacagacaggaagcccccgtccagcggcgtcaccgtggccagcaccgtgtagagcgaaccgtcggcggccaggttgtgcacataggcgacgaacggctggtcgtcgagcaggtagtcccacatcgcacggaacgcggcaccgggcatcacgggatggcggatgatgttgtgcggcgagcccaccagcacctcacgcggataacgcgagatgcgcacgaacacctcattggcctgttcgataacgcctttacggtccgtggtcgagaagaacacgtcgttgagtccgagctgctgctcggtgccgttgggatcgggcgcggaaaccttgcgcgcgacatcgcgccaaccggtatcggccgtctgtgcgctcatagtcccatgtccttagatcgtccatccatccggaatgcccactccggttcatcccgcgcgaaaacaggtcctttcaggaggattacgcgcccgtggccggccagcagtttctgcatcaagagattactcgacgccgccggcgggcagccaatggccaacggggccctactactctggcagccatgcccgatgttgcccgacgcgatctgaacctgttgccgaaggcacatctgcacctgcacttcaccggctcgctcgacattcccacgttgcgggagttgtcagcgtgggagggcctcgacgaggccgagcaactcatcgacgacgaccccctgtcggtgccggccaccaagcggggctggtggcggttccagcgcacctatgacattgcccgccacgtggtgatctccgaacgggcgctgcgcgccgtggtggacgccgcagcccgcaacgacgcggcccagggctcgcgtcgcaccgagatccaagtggaccccaccagctatgcgccgtatgtgaatggccttgtcaacgcgctggagatcatccttgacgaggccgccctggcatcccggcgccatggcatccagatgggcgtcatcgtggccgcctcgcgcctgcaccatcccctcgacgcccgcacgctggcccgcctgtccgcccggttcgccggccgcgggcccggcggcgtgatcggtttcggattgtcgaatgacgagaccgagggcaataccgtcgagttcggaccggccttccgcattgcccggcgggccggcattcccggggtgccccacggtggcgaattccgtggtccccaccacatcgcgcaggtgatcgacgagctgcatcccacgcgcatcggccacggtatccatgccgccgagagcccggcgctgctgaaacgcatcgtcgatgccggaattacgcttgaggtgaatccggcgtcgaatgtgagcctcggcgtctatcccgactactccaaggtgcccctgcgcaccctgttggacgccggcgcgcaggtggcgctgggggccgatgatccgctgctgttcctgtcggggctcaccgaccagtaccgcatcgcccacgactacctggggctcagcgacgccgagttggcggagctggcccgcatgagcatccgcgggtcgttcgccgagcaggccgacaaggcacgatggctggccgaggtggacgcctggttggccgccgctccggagtccgggcccgtcctgcctgcagccggtgtggcacctgtccccggcgggctggtcgcccgtccctcggggctgctggtgcccgagcggggcctcgtcgcgcctcccggggacggcggcgcggaatcggcggatgcgggccaaggcgtcccggatgcccgcaatgtcagacccggcctctaacctcgtggccatgaggatcctgcacaccagcgactggcacctgggacgcacgctgcgcggcgtcgacctcagcgacgcccatgcggccttcctggaccagttggtcgccgtggcgcgcagtgaacgggccgacgcggtgttggtcagtggtgatgtctttgatcgggcgctgccgccgctcgatgcggtgaacatgctcaacgacgcgctggcccggctcaccgaggtggcgccggtggtgttgatccccggcaaccatgactcgccgcagcggttgggcctcaatgcgaagctgttgcgcgaccaattgcacatccgtgcgacgctcgccgacatcgcgcacccggtggtgctgcccgacagcaccggccacgacgggctggtggtctacgcgatcctctacctcgatcccgacatgactcgtgaccgcctcggcgagctggcgggcgtcgacggggacgggcggatcgcccgctcccatgaggccgtggtgggggctgcgctgtcgatggtgcaccgcgacctggcacgtcgacgcgccgccaacggcacccgcataccggcagcggtgatggcgcatgccttcgtcaccggggcccaacccagcgattccgaacgcgacctgcggatcggcggcgtcgattcggtgccggctgcgctgttcgccgacgtcggcgccgactatgtggcgctgggccacctgcacggggcgcaggccgtcgcgggatcgcgggatccggcatccgaccacgacgagggggccgtgatgcgctacgccgggtcgcccctggcgttctcgttctccgagcagcaccagcacaagtccacggcgctggtgaccttcgatgaggcgggcccggtcgcctctgtggagctcatccccaccccggtgccgcgtcggctcagtgacgtgcgcggctccctgcagcaggtgctcggcgaggacttcgccgcgcagcgcgatgactggacccgggtggtggtcaccggcgaggatcgccctgcggacctgtcgcgcaccgtcaagaaggcctttccccatgcgttggagatccggttcgagtcaacgctgcgggagcgggaggtgcgcgcaacggtgagcgcgcaggccgacccgctcgatgtggtgggccagttcgtcgccgatgtgagcaatcgtcgccccgatgccgccgagctcacggtgttgcgcaccgcgttggaacgcgcgacgaagcagggggaacgctgatgcagatcctgcggctggaactgtcgggcatcggtccctatgccggcaccgagcacgtggacttctcccggctgggtgccgacgggctgttcctgctggagggcgccaccggctcggggaagaccaccatcatcgatgcgatcgtcttcgcgctctacgggcaggtggccgccgacgactccagcggcgatcgcatggtgtcgacccatcgcaaggcggccagtgagccctatgtcgacctggtggtcgacacctcgcgcggcgtctaccgggtgcgccgcaccccacagttcacccgtcccaagaagcgtggcgagggcctcacctcggtgaacgccaccattcgactgtggaagctggccgaccccgacgaccaggacggcgaacccatctcggccaacatccaggacgcgaacaaggagctgcaggctgccatcggattgagccgcgaccagttcacccagacggtcgtgctgccgcagggccatttcgccaacttcctgcgctccaagcccgaggaacgccggggcctgctgcaacagatcttcggcaccgagctgttcgagcgcgcccagcaggaactgaccgcaatggccgcggactacaaggcccgcgccgatcaggcccgcacccagatcaggtcgctcgccgagcgcttcgcccattccgcatggcccgatgaggcgcccacgcccgacgggtcccccgcgtccgaggcgacaccggtaccggccgacgagacgcccgcagggcaccaggacgtcccggtgccgggccccacaccccgcgaggccttcctcgccctgctcgacgacgatgacaccgctccgctggtcgctgcggcccacacacggctgcgggagctgcaggccgacaccgagcagcgcacacaggcggtcgccggcgcgcgggaacggctcggcggggcccgcgccgcgcgcgatgcagcgcagcgcatcgtcgccctgaaggccgaacatgacgccctggttgtgcaacgccaggagctggaggcccgcggtgaccagatagccgcagaccgggtgcgcctggacgccgcgacgcgggccgccggaagcgcccgcccgctcgccgcagcccgccgcgcggccgcggcgctgtccaccgccaccaccgagtgggaggtggtggccgctgagatcgctgccaccgacgacggtgtgctgctggagcaggtgcgcccgcacgcggtggggaacctcgggtcgccggatgggtccgatgacgccgcgctctccaccctgcgcgatgagatcacccgcctgggcaccacccgcggacagttgggccagctggcccaactcgaggcaggactacctgcccgccacgcccgcctcgacgccgacaatgcacggctggccgagatcgccacccgggttgccacgacgcagcaggagctcgcggagttgatcgcaggccgcgacgagctctcacaacgccacggccaacttccccccaccgacgatgcgctcaccggcgcctccctggcgcagcaagcggccacccggacgctcgaggctgcgcaggccgccgagcaggatgcgtcccagttggttgcactgcgcgccgcggagcaggaggcaatcgacgcggcagacctggccgaacgggaataccgcacggcccgggccggctggctcgacgggctggccggcaccctggcaggcgagctggtcgacggcgatgagtgcccggtctgtggcgccaccagccatccccacccggcaacgccggctcagggtgcggcgacgcgcgatgacgtggagcgcctggcccagcaggcccgctcactggccgatgcccgggcccgggcagccatgcagtgcgacgtcgccgcacagcaccgcgtcgaccaccagaaggccgccggcgggaaggacgtggcacaggcccgggcggacctcgatcgggccgacgcggaactggccggtgccagtgccgcggcagcccagcgggtggagctcaccgcgaggatcgccgacgccgaccggcaggtgaccaccacccggtccacgctcgccgagctgcaggccagcgcgtccggcctcaagggcgccatcgcgacggccaccacgcagctggacgatgaccaccaccagatcgaccggcaccgcgaggactatccggacatcgccgggcggctggcgcacgtcgcacgacggctcgacgcggccacccgcatcgtcgacgcgttgcaggcgcttgccgcggcccgccgggaaggcgtcgcacggcgcaaggaggccgaccaggccctggccgatgccggcttcgccacctctgacgaggccggcgccgccatgctcgacgccgagcagatcgcggcgctgcgccagtcgatcaccgacttcgacacgcgccgggcccgcatcgcagcacagctggagcgtgccgaactcgtggccgccgtcgcgtcgcccgtccccgacctcgagtcactggacaccaagctggccgacgccgagcaggcccaggaagccgccgagttggcgttgggccgcgccacggcgcacctggcccagtcgcgacaggccgccgaggagttggaagccgccagccttgcgttgacgcggatggcgcccgaggccgcccccgtggtgcggatggccgaactggccacggcgggcgaccgcaacctgcgcaaggtcaccctgcccacctatgtgctgctgcgtcgcttcgagcaggtgatcgaccaggccaacgaccggctcgagtcgatgacccacggccgctacagcctgcagcgcaccgacgagaaggagggacgttcgcgcaagctcgggttgggcctggtggtgatcgaccacttgccggtggacacggcgcgcgagacgcagacgctgtccggcggcgagaccttcctggcatccctggccatggcgctgggcctgtccgacaccgtcaccgccgaggccggcggcatctccctggacagcctgttcgtcgacgagggattcggctccctggaccccgaatccctcgacatggtgatgggccaactcgagaagctgcgcgccggtgggcgcaatgtcggcgtggtgagccacgtcaccgagatgaagcagcgcatcgccgaacgcatcagcgtgcgcaagctgcccgacggcagctcgaccctgaccaccacggttgacgactgaggcctgccttcaggggcactgcagctactgcgccgcgacggtgcccatcaccttccaggtgccgtcggcctccttcaccatcaccgcggtgtagggggtcggcgcggcaccgggcacggtgacctcaatgcgcaccatcgcaccggtctcgtccaggggcgtccacgacgacgagtcgacggcaatcgtcgtgccgggcgccagcaccgcggcagggtcgacgttgaagtagtcgcgtgcctgctcggcaaggtacttcgacggttcgctcgggaagctggtcagcacctgggtgccggccgcgacatcggcccggtcagcggtcggtgccgaggacgaatccgcggcaggcgccgggctcgttgcggtccccgacgccatcgtcgccggcgatgcctgcgggccgggcgtgctgccactgcgggcacggccaccgaacaggccggtgaccccggcggccaccagcccggccacgagcagcagggccagcacggccacgaccactcgtgaccagggcttggtcaccgggattccctcactgccgacacggtggttgcgccggctgactgctcgccggcggtggccggatcatgccaggcggtattggcgcccagcacctcggtgaggtcacgctgcaggtcaccggtgatggtggtctcgtgcagcatcgcctcgtggaagcaggggctcgacaggaggtcggcgggttgctcgacgctgttgccctgccccgccagcatgaggcgcaccaggccggtctcggccgacttggtggagatgatgccgtattcgcagttcacctggcggctgcgctgtgagccggccttggccgagtcgacggacacgagcaggtcgcccaggtcgagcagccgcggcgagttgagcccgaacaggctgatgccgcccatctggatgtcgcccacataggcggtgaccttcacgttgtcgggccaccagggcaactgcgccaactgggccgagccggtgcgcagggcctccccgcccgacgagcggaaggcgtcgacggcacggatgccggtgcaggtggtgttggtggcgtccatctgctcggagcactggccgatgtagtcccacagcatgcggatcggcagcccggccagcgggatctcggagccgatggtcagcgcactggcgatcatctgcgccgagtcggagccattgttgggcgcgcccacggcgagcacattgctcacccgcccggaaatcggacggcccttcgaatcattgtttgacaaggcctgacgcgccacgagcccgcccatcgaatgggtgaccagcaccggcttctgctggtaggagtcggacaggcattcgatggcctgcgacagcttcgggccgatctgcggatcggtgacccaccgcgatcccacctgcgaataatcgaaggtgtacacctcggcgccgggcacctgctgcaacatgccgatcagcgatgagcggtactgcgactgggccaacaggtagccggtgccccctgccgggtcggcggtgcggtcgacatattgcgagaacaggtggtcgcgcgcatcactatgcgtgtcataggacacccagccgtgcacgatgatcaccggcacgcggcggccgtcggcggtgggcttcggcgtgatctgcttgccgtcgggcgtgtggtcggaactcagcaccggcgccagctgcaccaggtcgccacatgccgacgccgggtccacgccagcggacgacgtcgatgtcgccacgctgcgtgggtggaactggtgcccccgtcggcactggcgggtgcggcctgggcggccaggggactgaaactcaagacagcagcgagggctgcaatcgtggtgcgacgtcgcatgcgattcctcctgtggggttccgacgcgaacccatccacgccggtggggatttcactgtcagctgtgcccggctcgggccaggggcagcctccatcgcctacggaagttaccgcgacaaggggtttcaccgccggacattccgaaagatattctcgagatggtcgatgttcgcgataacttaacccgcgttatccgacattctgggcatttgtttctgccgggaggatattcgatgggatttctcccacccatcgtgcggcgtgcccggcccgggccgggcacctccgcagccccgcggcgaggacccccgtggccggcgcgagattagggtgggcggcaaggagctgcacttacgcgcagcccaccatcacgaggagacgcccatgagctttctcagcgccgagttgctggcagcaatccacaagcgggccgcccgccacgaccgcgacaacagctttcccgaggacgacctgaacgacctgcgcaccgccggctacctgtcggcgttcgtgcccaaggagttcaatggtgccgggctgagcgtcgagcgcatctgcgccgaacagaccgcgctggccaaggccgcgccggccaccgcactggccatcaacatgcaccagatcatcgtgggcatggcccgttacctggtggcccacggcaacgaaaagggacgccaggtgctgcacgacgccgccgccggcgaactgttcggcttcggcatcagcgagcccggcaacgacctggtgctgttcggatcgatcagcaaggccgtgcccgacggcgagggcggcttcagcttccacggcaccaaggtgttcacctcactggccccggcctggacccgcctgctcaccttcggcaccgacgactcgggcgacgacggcccccattcggtgttcgcgatcctgcaccgcgacgacggcggcttctatgtgaagcccgactgggacaccctgggcatgcgcgccacccagtcgaacacgacggtgctcgacggagcccacgcccccgccgaccaggtgctcgcccgcatcacccccggcccgaacgccgatccggtggtcttcggcatcttctcgcacttctcggcgttcatcgccgccacctaccagggcatcggcgagcgcgccatcgaggtggccgccgagcaggtggccacccgccacagcgtgaagaatgacgacgtctacgcccatgatcccgacatccgctggcggcttgccgacgcggcgatcgccatgaacggctcggccgcccaactgcgcgacatcgtgcgcgacctcgacgacgatgccgaccgtggcgccctgtggatgccccagctgtcagcggtgaagaatgcctgcgtcgaggcgacgatgcatgccgtcgaccaggcgatgcgctcggtgggcggacgcagctactacacctccaatgagctgtcccgcctctaccgcgatgcggtggccggcctcttccagcccaccgaccaggagtccctgcacgcggcatgggccaacgtcgtgctgggacccatcacgaagggctgacgcccgcagggccccatcggcccccgtcgtcccgcaccaagaccggaccgggcagcaccgccacccggccctggccccgcgggagacacaggagggcccccaccgaatcatcggtgggggccctcctgtcgttcggtcgtgttactgaccgcgcccggtcactcagaccaggtgctgagccagcatctcgagcacgtggtggtaggtgtgaccggttgcccgggtcatgcccatctcgcaggtgcggttgcccgacacatactcgtcataggtgcgctgcgtcacctcggcggtctcccgcttggtggccgaggcggtgagctcgggatgcagcaggccgcggtcgccggcgaaggcgcagcagccggcgtcaaccggcaccgtcacatcgtcgctgacggccagggcgcaggcctcgacgtccttcacgatgtccaggtggcgcatcgagcaggtcgggtggatcaccacagagccggcgttctggctgaacttcagcttgccgagcaggttgcgcgccacccacgtggtggtgtcaaggatctcgaccttcttccagttctccgccttctggccggtgaggtgctggccggtggtgtgcaggccgtgggtgcagcttgcggcatcgcagaccacgggcaggcgaccattgtcggtggccttccacacggagtcgtagacgcgctcggccatcgtgtcagcgcccttggtgaagcccttcgacacccacacggtgccgcagcacaggcccgagatgttctccgggatgcgggcgcgctggccggcagcggccaccagcttctcgaaggccccggccgcgccgtccttgtagccgcccttggcgggctcgaacagcgagcccatgcagctggggaagaacacgaagtcgtcctgtgaggtcgactcgggttcgggacgcttcgggccgccaccgggaaggtcgttgccgaccttggggatgacgtccttgggcagcacggcgcgcgcggcaaccgtgacgccggtcatgatcgggctgggcaccacgtcgaccacgttcagtgcaccgcgcaggaaggtgacgatggggccccattccttggcggcggcgttcatggcggtcttcgagatggccatgtggcgtgcggcgcggaaggtcttcatgaacacgccggtgtcgatgcgcagcgggcaggccagcaggcacagcgagtcggcggcgcaggtgtcgacggcctcgtaggcgtagtccttgcgcagttccttggcctgctcggggggcagttcctcggcagagcgcagcagcgcgatgcgccgacgcggggtctgggtgaggtcggccgacgggcaggtgggctcgcagtagccgcactccacgcagcggtcgacgaagtcgtccaccggcggcatcatcttgaagtggtgcatatgaccctcggggtcatcggtgagcagggtgcccgggttgagcacgccgtgcgggtcgcccaggcgacgcaccgtcttcatcacgtcatagagctcggcgccccactggcgctcgacgaagggggccatcacgcggccggtgccgtgctcggccttcagggtgccctcgtggcgcagcacggcgttgaccatgtcctcggtgaagtcgcggtacttctcgacgtccaccgggttgcgccagtcggaggtgaccatgaagtggatgttgccatccttggcgtggccgaagatcaccgcgtcgtcatagccgtgcttggcgaagatgtcctgcagttcggcgctggtggcggtgagcgaacccaccggcacggcgatgtcctcgagcaggttggtggtgccggccggacgcgcaccggcaaccgaggtgtacaggcccttgcgcagctgccacaggttgttgcgctcggggatgttcttggtgaagcgcggcgggttggcgatcggcaggccaccgagcacgctgttcagcgcgtccatgcggtcgtcaagttccttctcgtcgtcggcgacggcctcgatgagcaggccggcgtccttcttgacgtcgagcgcggccagctcgggcgatgcctcggggtacttctgcacgacgcgcaggctggcggcgtccatcagctccaggcacagggcgccgttgcgcacgaggtcttccagggcgtcggttgccaccgacagctcggggacgatgagcagcgcggtggcggcatgcttctgcaccggcagggtgcggaaggtgacctcggccacgaagcccagggtgccctccgagccgatcatcaggtgctccaggatgtgcaccggctcgtcgtggtcggtgaaggagttgatgccgtagcccatggtgttcttcatggcgtactgctgggtgatcttggccaccgactcggggttcttgcgcacgcggtcgcgcagctccgacaggccctcccacagggcgggctcagcgcgatgcagcttcgcgtcggcatcgggctgtgcggtgtcgatgacggtgcccgaggggagcaccagcaccatcgactcaagggtgttgtaggtgttgaactgggtgccgcaggccatgcccgacgagttgtcggccacgacgccgccgatggtgcaggcgatctcggacgccgggtcgggacccagcttgtagccatagcgcgccaggtgtgcgttgacgttgcggatggtggcgccgggctgacagcgcacccttgcgccgccgtcgagcacctccaccttgcggaagttcttgcgcacgtccaggaggatcgaatcgctcagcgactggcccgacaggctggtgccaccggagcggaaggtcacggtgcggttctcgcgataggcctgggccatcgtgttcgccacctgggcggtgtcggtggccgtgatgaccacctcggggatgagcagatagtgcgatgcgtcatgggccattccgactcgatcgatgagtcgagtggttcccactgccttctcggttgtcgcggacgacattgtgcctccttgtgcgctcgaatcctcgtcgatgctcgagctcgtatgccacgccggtcggtacgaaccgggattccatggttctggggtccgaaatcaattggtccgaccaactaccaacatacactttgcggccccgcgccaaaatatgcggggcaccgtggaaggggcccgaatcgggccttcccgacgcgtatcaaggggtggaaatatctgtgtcactccgtgggattttccgggccgggacgcacgaaacctgcgtcgatgcggctcagctttcctctacgccgacgctgatgccggcgctgatatcggtgcctcggccggcaccccggcctgccgagggttgggccaagctgctggcccggccgatccagctggtcaggcctgtcccccgggttcggccagttctccgggttcggccagtcctccccgttcggccagtcccccaggttcaaccagtcccgccgcccgggtcagggccacgcgcaccggggccagatcgggggcctgacgggtgggatgcacccggttggacagcaggatggcgtagtcgccggcgcggttgagcaccacgctcgtgccggtgaagccggtgtggctgcgcagccacggcgcatcgggcccggccgcgcgcgtctgggccacgcacaggccggccccgtggcggtatccgttgcgggcggcctcggcgtcggcatgcccgcccagcaggcgcggcaactggtcatcccacagcatggcgaacgactcccggcccagcacgccgggtaggcctgacgacagggcactggccagccgtgccaggtcggccagcgtggagaacatgccggcattgccgctcactcccccgatcacctgggcggtctcatcgtgcacggtgccgcgcaccatggtcaggtccacgccatcggccgccgagtccgggcgcgatgcgctggcggcgtcgcgcgcgtgagtgctgcctgccggtcgcagtcccagggccgggcggaactcggtcggtgcgatgtcggcgacatcaacgccgtggcgcagcgggttgaatcccgtgtgcgccaggccgagcggacgcagcaccctggcggtcaccagctgttcccagccctgtcccgtggcctgttcggccagggccatggcggtgatgtagccgacgcaggagtagtccagtcgctcgccgggcgcccagcgcagcggcatggccacgatgtcggccaggatcgcctcgcgcgaccgggagcgcatcccggcgtcctgccacccgggccacaccggcggcagtccggaggtgtgggtcagcaggtgcagggcggtgatccggcgccgttcggggctcgtgcggaaggcgggaagcagcgctgcgatcggctcgtccatggccagcgtgccctcgtcggccagcgacagcacggtgatggccgtgaacaccttggtgatcgacgcgaggtcgtagtgcaggtcgggccgcaccggttcgcgctgcgccggggggatcggcgatccatcgcgtccatggctggcgatgcttccgaccccggcgcgacgcaccgtgccggcgcgcgacacctgggcgatggcgccgggatagcatccggcgcgcagcccgcgggcgagcacctcgtcgattcccgatgtcatcattggtctcccctccgggcgcgcgccgcagcacggagccctgtccgcgacagcgcccactcccccacgagcttgacgcaggcgggcacctcgcgcaggcggtaacgccaccacttggcattgtgatcgcgggtggtgtcggcgacgccgaacgcatcgatgccggccatccgtgccgctgccagggcgcgcggtaggtggtaggcctgcgtcaccaccaccatcgcgtccagtccgtgcagctggcgggcgcgcacggcgctggtccaggtgtcgagcccggccggatcgcgcagcacagcaccgcgcgccacgccgtgggcgacgaggtagtcggccatcacggccggttcgtcgtagcggaggcccgcggcatcgtcgggggcctccgcccacccggagaccaggatgcggctgatcgcgccctcgcgccacaggcgcaccgccaggtcgagtcgggccgccagatagggggttggtcgctgtccacgcaccccggcgcccagcaccatggcggtgtcgggcgtgacgcctgcgtgcaactgcccgggcgtgcgtcggcggccggcggccaccgcgtgcaccaccacattgcagcctgcggtgatcgccgtgagcaccgtcaccacggccagcgctgcggcccctgcacagcgcgcgggccgtgcgaacggggccggcgggcgcgccgcgggcgcgctgcgcgggtgccgtccggccgcggcctgacggtgccgtcccgcggcaggcagctccgggcgcaccccggcgcgcaagcgcctcatcgctcagcgattgccggcgcgcatcgccttgtaggcccggatgaggctcatcgtcgacgagtcctggctcatcagggcctcgtcgccggcggtgagcagcggggcgatgttcttggccagggtcttgccgagctcgacaccccactggtcgaacgagtcgatgccccacacggcaccctcggtgaaggtgatgtgctcatacagcgcgatcagctcaccgaggatcctgggcgacagctcgggggccaggatcgaggtggtgggccggtttccgctgaacacgcgggcgggcaccagcggctcgggggtgccctcggcgcgcacctcgtcggcggtcttgccgaaggccagcgcctgggtctgcgcgaagaagttcgacatgaacaggtcgtgcacgtcggcaccggcctcggtgagcgcgtgggccggacgcgcgaagccgatgaagtcggcagggatcacgcgggtgccctggtgcagcagctggtagaacgcgtgctgcccgttggtgccgggctcgccccagaagatctcgccggtctcggtggtcaccgggctggtgtcccaccgggtcgacttgccgttcgactccatcgtcagctgctgcaggtaggccgggaagcggtgcaggtactgcgaatagggcagcaccacatggctctgggcgttgtagaagttcgagtagaacacattgagcaggcccatcagggcgggcacgttctcggcgatcggggtgatcatgaagtgcttgtcgatggccaggaagccctcgaggaagtcctgccagttgtcgggcccgatggcgatcagggccgacagcccgacggccgaatcaaccgagtagcgaccccccacccagtcccagaagccgaacatgttggcatggtcgatgccgaactcggacaccttctcggcgttggtgctcacggccacgaagtgccgcttgatggcgcgggcacggctgtcggcggtgccgtcgatggcgccggacgactgcagcgagttgatcagccagttcttggccatcctcgcgttggtcatggtctccagcgtggtgaaggtcttggacgcgacgatgaacagcgtggtctcggcgtccaggtcgtgggtcttctcgtacatgtcggccgggtcgatgttcgagatgaagcggcattcgatgcggtcatgcttgtagggcttgagtgcctcgtagaccatcaccgggccgaggtcggagccaccgatgccgatgttcaccaccgtggtgatcggcttgccggtgacgccgccgcgctcgccgctgcgcaccgcctcggcgaaggagatctcgcggtcgagcacctcatgcacctggtccaccacgttgacgccgtccacgtcgagctcggcgcccttgggcaggcgcagcgccacgtgcagcacgctgcgatcctcggtggtgttgatgcgatcgccgcggaacatcgcgtcgcggcgtccggcaaggtccacctgcgcggccagcgagacgagcgtgtcgcgcacctgctggttcaggtagttgcgcgacaggtcaacggtcaggtcaccggcacgcagggtgaactgttgggcccgattcggctcctcggcaaaccacttgcggaaatcgacgtcgaggctgcgatgcaagttttcgagctcagcccacgcgggcgtgctcgtgggatcaaccggtgaattcatgaggccagtttaggggtgccggccgcgctcgtccgatgacgaacgaagcccgacgggaacagtgccccgaagtggcgggaaaaccgctcagccggctgcctcgcggagccccgggacggtcatgccgccggggaaggacccgcgccggatgcggtccggtgtgcgggcgaaggtggctggtcgcagccgactcagccgatgtgcgtgacgctggagaccggcatcgagctcacggtgccgacgatcacgccggtgccgtagtcggccgcgtgcaccacctggccgttgccgaggtagatgcccacgtgctcgccgccgtagaagaagatgaggtcgccgggcaccatggtggactgcgacacggccgtgccggcagccatctgggagtaggtgacgcgcggcagcgagatgccggctgccttgtaggcggccatggtcaggcccgagcagtcgtaggcgttggggccaaccgcaccccacacatagggcttgcccacctgggcgagggcgaagttgatggcggtctgggcggcgctcgtggcggcggtggccgcattcggggctaccttgacgcccttgccggtgacgctctcggcggcattggccgcggcgattgcctgctcggaggcagccttgtcagcggcggccttgtcggtggccagcttctgggcggtgctcttgccgaggctggcgaacgaatcgttcaggtcctgggcggaggtgtcggggatcgtgggcgacgtggtggcaacttcggtggtggccaggtcgctggtgaacagctgggtgcgggcggtgtcgcgggtgacgcttgcggtctggcgggcctcggcggcgccgttgtccggggctgcggccacggtctgcggcagcagggtggccccgagcccgagggccgaggtgagcgcgacggcggcaaccggcagcgagacgcggcggtgcggcttggcactcgacttcgcggcatgcacggcgtcgacggtgatcaccggcagcgtcatggtggtctgggccgacacgcagcgcgcgaacggcaagatcgcgtcttcctcgacgctgggcagcgcgacgcggcggggcctggcgaactcaatgggtgcatctgcacggccggggatgccggccctgcgaggagcggtgggctgatcgactgtggcgtcgatgtcatcggcgctgagagctcgacgagcagtcacaggtatcctcacttgcttcaaacgagtgtcttggtgttggcggcccgaccggctgcctcctgaactataaacgaaagctgagagaacttacaaactgacgcagtttttctcagattcgggtcagaactgcgcgttccacgcggggatcgccgcccgatggctccatcgaaggacggccgcgcgagacccccggggccccacgatcgggcctttcctgagaatttctcaggaggacttcacggcggagaccatctcggcgacgcgttggcgcaacgccgagtagtcctggctgaggaacacccgcgacagcagcgactgcccgaagctcaccgcggtggcgccggcccgcagccacgcctcgaccgccgcccggttctgggccgtggcgatcagtgaggcgccgggcaccagctcgtgcaggccctgcgcgtatccggtgccgaacacctcggcgggacgcacgtgcaccgccgagaccgcgccctgccacgcctgctccacctcggtgggcgtcagggccgtcacgatggccggtatcgaggccacccgcagggcatcgagcacaccgggctcggggaacaggcagaacgcgaaccgtgcaccggcgcggatggccaactgggcgtcggccgtggtgcgcaccccatggatgcccaccgtcgcgcggaaggagtacatcgacatcagcccggtcagctccgccgaggggtcctgtggcgtgtcggcgcccgcgtcgtccgccgtctcatcgctgcgggggcagggcagggcgatcgcggtgagcccctcctgcacgagcacctccagcaccggcatcagggccccggagtcctcgtcggggggcatcagcaccaccccctggtggtggtcagtgcgtccggaagcgccagcctgctggaggaattggtcacggtattcatcatgcccgcatccccgtgcgccgcgcggtctccgtccgaacgcaagtgcgtgcatcgtccgaacgcgagtgcctgcggcacctgcaggccgactctgccgcaccggtcgcggcgccgggcctgcgagaatgggggcaccatgaccgatacgctcaccgagctgctgcccaccggcgacgccgcccacgaccccgacgccctgttcaatgccttcgagacgtggacccacgcgcagggcctggagatgtacccgcaccagtccgacgcactactggggctgctcaccggggcgaatgagatcatcaccacccccaccgggtcgggcaagtcgctgatcgccaccgccgcgcacttcgtcgccctgtccaaccgcggccgcagctactacaccgcacccatcaaggcgctggtgaacgagaagttcttcgcgctgatcgacatcttcggcgccgacctggtgggcatggtcaccggcgacgcctcggtgaaccccgacgcgccgatcatctgctgcaccgccgagatcctggccaacatcgccctgcgcgagggccgcgacgccgacgtcgacctggtgatcatggacgaattccacttcatcgccgatcccgaccgcggctgggcctggcaggtggggctgtccgagctgccgcagtgccagttcgtgatcatgagcgccacgctgggcgacgtcaccgagctgcagggccgcctggccaggtggaccggacgcgagaccgaggtgatcggcggcgccgagcgtcccgtgcccctgacctaccactgggccctcaccccactgcacgagacgatctccgaactggtcagcaccggccagtcgccggtgtacatcgtgcatccctcccaggccgccgccaccgaacaggcccaagcgctgatgagcgccaagctgatcgacaccgagcaccgccacaagatcgtggcggccatcggcggattccgcttctcgccgggtttcggcaacaccctgtcgaagatgctgcgccacggcatcggcgtgcaccacgccggcatgctgcccaagtaccgccgcctggtggaacagctcgcccaacagggcctgctcaccgtcatctgcggcaccgacaccctgggcgtgggcatcaacgtgcccatccacacggtgctgttcaccgggctgagcaagttcgacggccgacgccagcgcctgttgcgcagccgcgaattccaccagatcgcaggacgcgccgggcgcgccggcttcgacaccatcggctatgtggtggcccaggcccccgaataccaggtggagaacgcgcgcatcgccaagaagttcgccaacgatgagcgcaagaagaagagcgtgcgccacaagaagccgccggagggcttcatcaactacaccgaggcgacgttcaacaagctcatcgaatcgacgcccgagacgctgcatgcgcgcatgcgcgtgacgcacgcgatgttgttgaacctgctgtcgcgcgatgaggacacggcggtggcgctggtgcacatcatcgatgccgccgtgagcgaccggatgatccgcgtgcggctgctgcaccgtgccgtgcagctggcccgctcaatggtggagtcgggcgtgatcgtgcgccgtgacagcccgacgcccggtggccgcctgtacgacctgagcaccgagctgcaggacgacttcgcgctcaaccagccgctgagcgccgtcgccatggtggccctggagctgctcgaccccgaggccgacgactacccgctgggcgtggtgagcgtcatcgaggcgaccctggagaatccgcgtccgatcctgcgcgcccaggagtcccgcgagcgcggggaggcgattgccgagatgaaggccgacggcctcgactacgaggaacgcatggccgcgctcgatgaggtgacctatcccacgccgatggccgaggaactggatgccgtcttcacggccttcacggccagtcgtccgtggctggtcgaatgggggctgcgtcccaagtcggtggtgcgcgacatgttcgagcgggcgatgaccttcggcgagtactgcgccttctacaaggtgcagcgcgccgagggcacggtgctgcgctatctgtccgacgcctatcgcgcgctgcgccagaccgtgccgctggccgcccgcacccccgagttcgatgagctgctcatctggctgggcgagatcgtgcgcatgaccgactcgtcactgctcgacgagtggacccgactcggcgaggacgtcggcgattccggagccggcgacgaacccggcacgcacggccccacgcgtacgttgacgtcgaacaaggcggccttccgggtgctggtgcgcaatgcgatgttccgtcgcgtgcagcttgccgccgacgacgatgtgccggcgctggccgcgttgaactccaccgatccgcagtcgtcgttcacctacaacgactgggacgacgccctgggcaagtactgggacgaccacgacgacatcggcaccggcccgaaggcccgtgggccgcagttcctcgagatcgacgattccacgcgcctgtggaaggtgcgccagatcatcgacgatcccgagggtgaccatgactggtcgatcaccgcgacgatcgacctggacgcctgcgatgaggccgatgacctgctggtgcacgtggtgggtttcgcacgtcaggatggcccggtcggcggatagactcggcagtcaacgacacgactggaggctgcgatgaggttgttcagcgatgatctgaagcagggcgaggagattgcgctcgtctttgccgaacgtggcgcaggcggccgcaacatcctgccccagctcggctgggacgaggtgcccgccggggcgaagagccttgcactgacctgctgggaccccgatgccccgatggagggcggtttctggcactggctggcgctcgacattccggtgtccaccaccggcaccgtgcagggcacgccgctgcccaccggcagcgtcgaactgcagaacgactacggctatcgcggctacggcggcccgaacccgccgcacgggcaggtgcaccgctatatcttcaccgtctgggcgctggacgtggcccacctcgaggtgccggcggacgcgaagccggcggccgtggaggaactactcaaggcccatgccctggcctcggcaacgttgacgccggtgttcacctccacgatctgaggcaccgcgtggggtccaccgggcccactgcgcgggcaacggcccggggacgccccgggcgcgcagtagcgtgagcgccgtgatggagtggtgcacgggtcgatcggcgcgggacatgggtcggtcagccgcgagtggggcaacggtgagtcggccgggacggcgcaaccggttggttgcgttcctgttgctgacggccctcgtggcgtccaccatcatgctgggcacgtcgtcagcgcgcgccgacgacggctggtggagcacccagccactggcctcgacgcatgccaagcagcagggctgcgcacaggtgctgttcgtgggtgcacgcgggtcgggcgaggccgccccctatggcaacacgatcgcaccgctggagcaggaactggccgcgcgcaccgcgaaggcgcgtcccgacctcaagctggcgcaggtctacctggactatccggccgtctcgctggacgacatgaacgccgcggcgatcgaacagatggtgctgcccgccgcgtcggcctcaaccccgccctattccgattcggtggacaagggcgttgccgagctgcagcgcctggccgtggccgaggcgaagcggtgcccgtccgagaagctgctggtggcaggtttcagccagggcgccgaggtggtcacccgggcgctggggtcgggcaaccttgacgcgaacctgctgggggcgatcgtgctcggcaaccccttgcgctacgacggccagaacgtcagcgagctcgacggcaccgccaccaaccgctcctatggactgtccgctgcgctgtactacctgcgtgcggcgtcggccagcagcgccgacaaggacaagaacgagcagatgaagcagctgctcaccgccctgttcgcgatgttcaacggcaccgtggacaaccggcaactcgacgccgccatggattccgcacgggcgaccgtgcccggtgtcgacgcgccccgcacctattcggcgtgcatgaaggatgatccggtctgcgacgcggcgggggccctgacccgcatcatgaccgggagcagctcggtggcgcaggaacacgccaacgggtcggccacccatggcagctataccccgcagaaccttcccaagacgcttgatgccgtggacgccaagctggccgcgttgccgcatgtggaggtgcagcaggcgccggtgaagaccggcctgacgctggccgccggggcgctgatcggcgctggagtggcgctggtggccgtcttggtgttcctgggatatcgggcgcgcaggcgggcacggcgcaaggccactgcggttcccgccgtggcgcgcaaggtgccggtgatgaaggcgcggaagcgcaagggcatggacgatacggccggcggctctgcggaggcgtgaggcggggcgggtggccgcgggttcggtgggtgcgggtcctccgcttgttgggtgcgggtcccggcccgttgggagtcggagcccccattccgcgggcgccggaccctccactcgctggacgtcggctcccccctaaatgggcagttgtgcgggaatgacgccgcacagttgtccacttagcggggttttgggtgcgggcggcgtcctggggccggttcgggccggatcgggtgggatcgtcactcagtggatggttgtggtgattagacgcgtcaagaccatccactgaaggcccgatcccgtcgggcaggccagggataggtgcggataaagcaccgtctatggtgctttatccgcacctatcaccacctccggcatcaggaccggcagaaccccggccacgtcccgtccctccggccgggtctcgtcaccccgcgcccggccactaactggacagctgtgcggcaatgacgccgcacaagtgtccaatgaggcgtcgcagtgagcggcccggacggtcgtcagggaatccaccagtggccgtggagttcgaaggcaccctcgacgcagatgatcacggcgatcaccagcagcccccaggacgcgaagcgtgaggcgcgggcgccccattgctggcgcacgcgggtgatgaaccggtggaccggcgcgaaggcgcctgcgaagacggcgccgctgagtgccagtagggcgatctggctgaggcaggcccacaggacgatgcccccgagccgcatcggccaggaatggatgccgcccgccaccaccaggaggccgtagaaggccgggtcgatgaatgcagacaggccgacgccgatcccgatgaccgccagcattcccaccgaatggcccgagcgcgtggcgtcgtcgggtttcggctgcggcacacgcacgagtcggacgatggcccaggccaggagacccacgccggcggccagcacgatgaggccccagacgatgtgccccgggtcgtgcaggcggtggatctgcgcgatcgcccaggtgccgaccgtgctggagagcacgaagccggtcacgacgatggtggcgaccgtggtgaccagcagggtcgcgatggcgcggcgacgggctccaagcgccatggcagccatcagtgccagggcccccaacgggtcgaacccggcgatgcccaggcctgcgatgcctgcgaatgcttcccccacgcctccagactgccgcatgtggcggggtggttcttcccggggtcgggggctggcagtcgggcggggcgacggggacacggcgcagtggtcgggttggcctccaactcggcctgcgtgctagtctttcggagctgtttgattgcggcatgcgcgagtggcggaatggcagacgcgctggcttcaggtgccagtgcccgtttagggcgtggaggttcaactcctctctcgcgcacaagcagtaaaaccccctctgacaaggtgaaactcctagtcagaggggtttttcatgtcactcggcgccgcatgtgacgctgcagagcatgtccccggacgacccttcctctcgcgaggggggaaaaggccgagacaaaacctgacacgaccgagtcggacgtcacgacgggagcaatcccagctccgcttcgccacgtcgaccccgcaccctgtgcacctccgacaagacgcagcaagctgcatgacgatgtatcacttgcggcccgcacgtttgcctcagacccagcgcgccgtcgatcgcgcgatacttcatccttgaggtggtccttctcagactggtgaccaacttcagttcgtcgggaaactactcgccgatcctcaggctgatggggataggcggcctcgtgctgatcgacttcgggatagggcgcctgatcaagaggatccgactcaagatttggtcaaacctcatctcacacccgccacgtggggggttctggacactgttgttagatgccacatcgaacgcaatctgttgcctgacccggaccctgccccaagcttccgaccaccggtccaacgcagcacagtaggctctccgcggatcggattccccatcagcggcgcctactcactgtcggagcatgcagagcacgcagcgacaagagtcatcgcaacagaacggtcccatgtagtcacgatgacccccatcaaagggtccggattttgggcccgccgtttcaacgacgcccgtgcctttgtcagataatgaccacatggcacgcttcaatccgccccccacctggcccacaccccccgaaggatgggaaccccccgaaggatggcatcccgacccttcatggcccccggcaccggagggctgggaactctgggttgacgatgaaagcgatgacccaagcacaacgacttcgcaactacaatcagattccactgcgcctctacccgcccggacggggcgacgacccatttggcagcgaaccggggtaatcgtttcagcacttgtaggggtttttccttctggtcgccggcgggacctccgcagcaacagctccaactcgagcgacatccccggcgacaagtccaaccgcgagcgcaacgctcacgccgagccccacccctacaccgacgccaaccccaaccccaacaccgagcaagtcgccaacccccacgccgacgccgtcgccgtcgccacgtcccgcaccagctgccacacaggaacaagaacaacccgcgcaagtgcctcaacaacagcaggcgaatccggcaccagcaccggtacaacaacaacctgctacctattacaagaactgcgccgcggtgcgcgctgcaggagcagcccccctccacagaggacagccgggctacagctcaaacctcgataaggatggcgacggcgtggcctgtgaatagcccggtcattcaataacttaggcttgctcgagctccgcgccggcagcctcgcactcagccaggaaagacttcaggtcgccgcagcgctcctgcgctactgagagcttcattgtggttttcgcagctctgaacgtcgcagtgacagttccgtttgcttggtcagtggtgtcaattttggtccgactcggcacgagaacacttgacccattcgtgaggagcccgctggtcagcgatacctcttgcccttccttccctgaatgctcgcctcatggctgttgacgcttctgtgcgaccaagccttcgcaaatgcgcgtgcagacaagaagaaggtgagacacgcgactacgcctattgcgggcacgatgccggcggcacccccacgagcaatccactcaatagtcgcgacgaccgtaatcaccagtgcgattacccacagagtagtgaccaatcgcttagggggatccaaaacccaccgccgctgctcgggcgatttcttggaagtcatgccaaaagcaccttctccctttcgcgtcttggatgttccggccccggtggctggcgttgggatgtcggattgataggacaaccccggccccaaatgcgtcgttgccttccccttgctgttgagtgtgaaggggccggccttggcagaaagggacgggcccgacttggacaggttgacccaggcatgcttgccaagcctgatgcgcttacggaaacggagagccacatccgcattctacggccaacgggattctgggggtgcagatccctagaatcaacatggccctcgaataggttgttcagcaccgtccaccggcaaatgagccacacctaggccgcgatcatccctccccttgtcgcgatcacatcccgcgccacatctgctcacaggctgcagcagaagtacggcgctggctgtttctcctgctcggagagacagccagcgccatcaggatcaacatcgacccctcaacgcccttcggcgcacgcaccaccaccatcggggggccggcgcgagggcgccccttggtcgcgtcacgactcgcagcaaccggctccccccggctggcgagttgccgcacatctcggtattcattccagccccggcccccgctcgcatgccgatcagccaaaccaccgcaggacgctcaaatcagagttatgtcctagctgcccgatagattcccgaacacaggcaacccaccaacctgaaggaaccccaccatgaagcgcatccacctactcctggcagtagccgttacagcgcccctgctgctcaccgcgtgcggatcaaccggcggtagcaccaccaccgcacgctcaagtggcaattcttcgacaccagcggttacttcgccgacccagtcagcgctggccattggtcagccagccgaagcccacggaaccacgataagcatccacgaccgaaagtcagtcggcatcaaagggtccttcaactaccagggcgtcaaggcaaagctgtgcaacaacacttcgcaggcaattcaggtgacgagcgaacgatggaccgcgttcgacgcggaaggtggacggtaccgatccgagaattctgggcaaaccgagttgaaacccgcctacccacaaggcttcagcgacgagcctgcagttgatcccggcacctgcgtgacgggctggcttgcttttgacgcatcggcaccactgcaacagcttcgctattcgaattcggacggtgatgtgctgatctggaacctcccgaactaacgaaccggcacgtcccacccacacggtccagtcggagccctcatctgcgtccacaaacgcccccgtcatccgccaggtcgaccgcgatcgcgtcgagaatgtccatcgggatgatcacgctatctaggagcgcgaactgtagcgtcatatagacgacgaaatcaggatctccctcatcgcgacccgaccggataagcgctcgactctccacggtcaaatacggctcaacctcgcgagcaatggcctcatccagatcattgacatcaagcatgacaccctcctctttcaaccctgaggtgtccaacgtgactgggagcctaccgtcaatgacgttcgcgacccctcttactgcgagcgtcgcgaacccgcgcagccgcacatctgtgcgctgccgctcgacgccttcgagccgaggggctgtctgtcaacgattcggccgcgatcctcgggatccagaggccgtgtctcccagctcgtctgagacacatcgcacccgaaatccccgaggcgaagaccggaacactctgctacggcgcatgagccctgccgctgcgggcgtcagggtcccctcacacccaggacatgcggcttcgcgctgcccatgaaggactctccccgccaggtgaccatgccgcgagagaggtttcatgtctctctctcgcgtcggcggaaggaccaccggaagcaggctcatgcgccgtccacaagcacctcgtcagtcgaacaccaccgtcacgccattgtcgccggagcagaagatgccgccggtgcccgaggtgcatgacatcgtcgaggtaccgccggtctcggcgtccttcgcctcgacggtcttggcgctgccgtagctgccgtaggcgccaccgacggcctggctgtaggcgtcgtgcaccgcggtgccgaaatcacaggtggtgttgccgttgaccgcaaggtcctgcccacagatggtgaacccggactcgcgccactgcgcctgcatcctgccttcttgcgtggcggtggcagccggcgtctccgccgcacccggagccacggcaccaggggtctgggcgggcaccgtcgtgaccggagccgtcgtctgcccgggcacgctcgctgcggccgaactcgccgacgccgccccactcggtgacgcgctgctcgccgacgggctggagcttccggtgagccccgcggcgaccttcgcgggcgacgccccgaagaccagcacggcgatcaacacgcccaccaccaactgcaccagccacgacagcgcgaagctccaccagtagacagacttgcggcgccccggctggcgaacatgcgccgcagcaatggcggcgggaatggcaccgaaaacgccgaacagcagcgagatgacaatcgttggcacaacgctgggcgaatggccacctccggctccgccaccggggtcggacaccgggggcatcttgaccgtgccgccgggatcaccctgggggccgacgtctcccggcccctgcggattcgtcccgttcgggcctgccggaaactgttgatcggacatatcgcccatctccttctcgccccgccattctccgcccgatggggcgtcgcggtgcgcaacgccgcgaaggatcgccgcacccaaaccggaaatccccatccgttgcccagaccagaacccctgatcacccgtcgtgggtcggctgtcaccacggcaacccggaccgatcacagcccacgaccggacgccgacacccccgaggacgaaccagccagcgaaatgagcccctcggctggcaacctgcagccggtgcaccgccccgcccacgcccatggatccccggcggacacgcagccatgcacatatcgggcccgtgcccggttcagtcacgattgccggtggctccttcccgatccgggggccggccactatatttcgcagcgcggcatgcgtcccggccgcggcgcccacccgaggagctccccccatgagcaagagagacaaggcgaccccgccgccctggtcgcaacccggcggacggcagggcaagtacgtccagcccttctcccagacccggtaccgccagcccttcgagcagggccccgacgaggcagcgccaccacaggccccggacgagaccacgccgccgagcggataccagggaacaccgccgcagtccgactattcagaggcccaataccaggggacgccctaccaagacgcccagtaccgggaagcctcctacgagcaggaccagttccagcagtctgccgaccagcagccccggcaacagacgccaccccgcaagggcaacctgtcaatggtcggcctggtgctcggcatcatcgcggtggtcgccgccctggtgcccaacgccggacctccgatggccatggcactgggcctcgccgccatcgtgctcggcatcgtcggcctggtgaagaagcacggcgccacggcgatcatctccatggccttcggcgtcgtcgcgctcgtcctctccgtggtcatgacggtcgccgtctacggcccgctcaagaacgccgcagccagcgccgccaacagcatcctggcctcggcaaacgcaggccagcccgcaccctccgccgacgccgagacccagcgggcactgagggatgacgtccgcgtctcgttcggcaacttcacccccggcaccgaatccgactggtcgtccgttcccgtgacggtgacgaatatcagccagcagcgccagagctacaacatctcgatctccgccgtcaacgcgaacggcatggaggtcaacgccgactcgatctatatccccgacctggatgccgggcgggcgaccgacaagattgccttcaagtacatcgacaccgacaagatggacgcaatgaagtccgccacctacacgatcaccagggtcctggtcatctcctgatccaccgcccgacgaaagacgatgggagccgccccctcatcggagcggcccccatcgtccgggaaatcgtgaagcaactgcgcgactatgcggcagcgccttcagcctgcgcctgcttcttgctgggacgcaggaagaaggtgagcacgaacgacacgacgtagagccccacgaggatccagaccacgccggcgacgccaacgctgcccaggaacagggtgaccacgagcgggccggcgaagttcgacaggccggcgccgaggttcaggatggccacggcggagcccttctgatcgggggcaagcgtgggcacgatggccgacagcggcacataggcgcccagggtgatgccgaacagcatggccgggacgatggccgcgagcatattggtgccgaacagcaccgagccgtagtacatggcgaacacggtgatcgcgcagcccaggccgccgatccatgcggtcgtcctgatacggccgatcttgtcgcccacatagcccatcaccagcgacgcgaacacattggcgaggttcaacgccgcccacacgatctgccaattcgaggtggtgaacccaacgctcttgatcatgtagtacgagaagaatgccgggaaggcgaaataggcgatctggttgatgatcctcaccacgccgccgatggcgatcttcggacgatgcaccacgatggtggcactgcgggcgagcccagcgatggtctccgcggcgctgggacgctgttcgtggccctcggtgttctcgggcttgagcagcagcagggccatcacgccgccgacgacgacgaaggccaccgacagccacagggtggtgacctcaccgatcaccgggatgagcagcgagggaacatatccggcgatgacgccctgccccagggcgaccgagaaccagaaccaacccgtggcacggcccaggcgctcctcgggggtcgccatggtgatccacacgaggaatccataggcgaacagcggatatcccacgccacgcaatgcgtacgaaatgatcatcaccaggtagctgccggtggccacgccgccggcaaggaagatgacctcgaagatcagccacaggacgaagccggtgagcatcacgcgtcgcggacgccatgaatcggccagcgccccggacaaccatgatgcgacggccaccacggcgccgtagacggtgagcatcacgctcacctggctggccgacagtcccctgtcctgcaggaacggggagatgaatcccaattcgagggagttaccggccatgaagatcatcacggccaggaaaccccacttgagggatccctggatgccctgcctttcgagcaggccgggcgaactattcgtattctgctgcgcgtttgtcacgcttcatgcacttcttttccacacttgacgatgtggtccaccggcgagcaggcggtcacctcgtggggtggcgcggacgtccgttggcagggcctcgtgcgacgataccggtgctcgtgtccccgcggcaatgaggctcgtccctcaggcgttgcgcccggcacgaagctcccgttggctgctccgcagagatgcgccagtccgcccgccacctcgtagccgtccgcgctgagagagatcgaccccaaactctcccattgatatgagggccgctgacactggtgccttcacatccgaccgtcgccccgcactctccgcgatcatcgacgtgactggaaactcgcagaccgagatgaatctgccacactgcctgcacaccgtcgctccatttgataaattgctgcgcgccaccccgaccggggtaagccaacgccgatcgcaccacgaccaaggagtcggtcataatggatttcgaagacgcacttgaagacatcgcaagtcggattggcgactacggaaacaccttggacactgaggaagccaccaagaacgcgatcatcatgccattcatgtccaaagtgctcggctacgacgtattcgatccaacccaagtaacgccggaattcacgaccgacgtagggacgaaaaagggcgagaaaattgactacgccatccgccgcaacggtgaggtgcaggtgctgatcgaatgcaagagaatcgatgagcccctcagtctcaacaatgcatcacaactgttccgatattttcacgtatcaagcgcacgaatcggagttctcacgaatggaaagacgtgggagttcttcaccgatctggatgagccgaacaagatggacgagaagccattcttgctgcttgacctcaccaacattgatccctacattctcccagagctgaagaagctcaccagggagagctttgatcttgattcagtcctcacggccgcggaagagctaaaatacgtttcaagcatcaagaagaccctagccgccctgttcgaagagcctgatgacgacttcctgcgcctgattgttgcgcatgtgtacgagggatcaatcacagccagggtccgcgatttcttccacccgctagtcggcaaagcaacgaaacagttcctcaatgaccgcgtaaatgcacgactcaagtctgccctgcaagatcaagctcccgcggtaggagtggtcgcctcgtcaaccgatgcgagcccggaggagactgccccccaaagcgaaacaacaaaccaagaaaagcccggcgtcatcaccacagaagaggaactcgaaggattccagatcgtccgcgccgtcgcagcatccgaaatcaactgggaccgcatcttctatcgcgacgcaaagtcctactttggcattctggtcgacgacaacaaccgcaagcccatctgccgcctgcatcttgaccacaaagcaaagtcgatcgggctgctcgacgaagacaagaccgaaactcgtctgcccatcgagcagatccaagacatctacaattacgcggacgagattcgggaagcagcgcgacggtacgtgtagccgactggatgcccttgacatgatctggagccatcggtccttcagcgcagtgagtctgctctgaagggccgaccctgaccccgtggcggcgcgtggcgaaccccggcgtccgaaaactgtcagaggtgctcactagcttcttggctatcggcaaatcgccgcgagcgaaggagctcccatgagcatcaacccaccagatgcgccctacccgaaccagccgcagggccagccggacttccagcccccgtcgggcacgcagccgcccccgccgggcggccaaccacccgtgcccccgcagccacccgctggcgggcagccgccgcagtcgccggaaggccaaggcaagaagaagcacaccgtgcgcaacatcgtgatcgccgttgtcgtgctcatcgcggtgatcgcgggatgccagggcctcaccaagggctcggattcgtcgtcgtcgtcctcgacgtcatcgtcgacgacgcagcctgccaccacggccaccagccgccctgcgaccacctcggcgccgaagaccacccaggcggcggcgccgaccactgccgcacagccggccgtgccccctgagtaccaatcggctgccaagaaggccgcttcgtacgctgggtcgatgatgcacatgtcgaagcagggggtctacgaccagctggtgtcggaatacggcgagcagttcagtgccccggccgcccagtacgccatcgacaacgtgaaggccgactggaacgcgaacgcgctggcggccgccaagagctaccagtcgacgctgaacatgtcaccggccgcgatccacgaccagctcacctcgagctacggcggcaagttcacccaggccgaggccgactacgcactcgcccatctcaacgattgatccacgttgaggcccgaatgcaggattccggtgccccgcaggttgcccgtgcggcggcttgcggggcccggacgcgcgtcagacgcgtgcgctgaggaacttgagcaccgactcgaagaagccacgaccgtcggtggatccggcggtcagctcgtcgatgttgtgctcggggtgcggcatgagcccgaccacattgccgcggtcgttggtgatgccggcgatgtcgtcgctggacccattgggattgtccaggtagcggaagaccacctggttgttgtcgcgcagcatccgcagcgtctcgtcgtcggcgatgtagttcccctcgccgttcttgagcacgatcgagatctcctcgaacggcgcgaaggcgcaggtccacgtggtgtcagtgacctcgacgcgcagccgctgctcacggcagatgaacttcatcttctcgttgcgcatcagcgccccgggcaacagatgcgattcacacaggatctggaagccgttgcagatgcccagcaccggcatgcccttgttggcggcatcgatcaccgaatccatcacgggcgcgaaacgggcaattgcgccgcaccgcagatagtcgccgtagctgaatccgccgggcaggatcacggcgtcaacgttgttgagcgaatcagaggcgtgccacaggctcaccgcctcgccgccacactgctccacggcgcgcagcgcgtcatggtcgtcgagcgtgccgggaaaggtcaccaccccaatgcgagaggtcacctcagttgtcctcgatgtgcacggtgaagctctcgatcacggtgttggcaagcagcttctcagcggcttccttcacctgcacgaggcgttcctcggtgactccaccgtcaacctcgatctcaaagcgcttgccctgacggacattgagcccgtcaaatcccatcctcgacagggagccggtgatggcctttccctgcggatcgagaatctcgggcttcggcatgacgtccacaactacacgggccatgcgcacagcttatcctgccggcccagcaaagccttccccgtctgaacccggacgattatcccggtggcgatcagggcggcgctcacagcgccaacggcgcaccggtcagcctctcgaaggcctccaagtagcgctcgcgagtggccgtgacgatggcgtcaggcagcgccggcggacgctcgccgctgctgcggtcccatcccgaatcgtgggtgagccagtcgcgcaggtactgcttgtcgaagctctcgagccggcccgcctcgtaggcgtcggcgtcccagaagcgcgacgagtccggcgtcagcacctcatcgcccagcacgagcacgccatccgggcgacgcccgaactcgaacttcgtgtcggcgagcacgatgccacgctcccgcgcgatctgctcggccttggcatacagccgcagggtcaggtcgcgaatggccgccccggtatcgtagcccaccgtgcggctcatctggtcgaagctgacgttctcgtcatgctcgcccatcggtgccttcgtggccggcgtgaagatcggctcgggcaaccgggaaccgtcgtgcaggccggcgggtaacgcaatgccggtgaccgagcccgtctcctggtattcggcccagcccgatccggtgaggtagccgcgtgccacgcactccaccggcaccatgtcgagcttttcggcgacgatcgcgcgaccggccacctcgtcgggtacgtcggtgctcaccacgtggttgtccacaatgtcgcccaactgcttgaaccaccacagcgacaactgggtgagcacgacgcccttgtcggggatcatggaatcgagcacatagtcgaacgccgagatgttgtcggtggccaccatcagcaggtgtgccggctcgcggggcaggtcgaacagctcgcgcacctttccggcgtggatcaggggcagaccgaggttcgcatactgggcgtgcttcacggggcccagattacgcggaaccggtgctgtccgttgccgcgcggttccacatggtcacccccgtgactgtctagtctttcgggcaggaggggttcgcgtgcgccaggcagaactgatcatgctcgtattcggcgtggtcgtcgccgtcttcagtgcgacggtctacacgatcacccgacgtcgccaccgtgccgaccaggccctgcccgacgtcgatccgggactcatcgcgcccacgacccacgatcaacctcccgccggcgtcgagcccggcctggcgggcgcccttttgaacggacgcaccgacatgcgcgatgtgttcgtggcgctggccgacctggccgcccgcggatacctgcagatcacccgattgaccgcgcagggggccggagcccccgattggcagatgcaacgcacccagaaggccgacgccgacctccccgaggccgaccgggccgtgctggcagccatcttcaccgcacccccggtgcccggcaccgacgagcggacgccacgccccagcgtgcgactcggcctgctgctggccgaccactcggagcccctgtcgcaggcccgtcaggcgctgcgcgccgagggcacccggctgggttggttccatcgcgacccgcatgaccaccacaccacgtggggctgggtcggcggggtgctgacgatcgtgggcctggtgctggccgtgatcagcgcgatcgacgtgatggccaccagcaagtggagcgccatggtcgggccgctgctggtggtggccggcggcctcctgctggcctccctgggccggttgcgtgcgccacgctcggccctgggcaaccacctgctggacgacctcgatgcctaccgacgccacctggacgcgctgcgtcccgaacaggtcgaccctgccggggcatccgccctgttcaaggcgacgctgccctggacgctcgtcttcggcagcgcagaggactttgcgaccaccatgtcgaccatggcgcaacgctccgcgggatggggcaagccggtgcgcctcgacctggcctggttctccgtgccggcaacagcgcggcccgccggcacacgagtgggcgccagcacctcgcgacacgacgccccgacgccccctgccgacaaccccctggtgtccttcgcccgggccgtgcaggagttcgtcgatgcgggcggcaagcaggacggccgcgacgacggctgagtcagccgatcagagcacggcacccggatggtactgggccgactcggggtcgtccgccacgatcttctcgacctgcgccaccacctggcccacctgcacgcgggccgcaccggtgagctccagcggggaactcaccagggcgtgcagctcatcgcgggtgaggcccaggcgcttgtccgccgcgaggcgctcgaacagcggattgaccttcgagcccgtctcacgcagctccagggccaccgccaccgcattctccttgatggcctcatgggcgtcctcacgaccgacgcccttgcgcacggccgccatcagcaccttggtggtggtgaggaacggcagatagcggtctagctcggcctggatcatcgcggggaaggccccgaagtcggcgagcacggtgaggaaggtctcgaagagcccgtcgatggcgaagaacgcgtcgggcagcgccacgcgccgcaccaccgagcaggacacatcgccctcgttccactggtcgccggccagctcgcccaccatcgacacatagccgcggatcaccacgctcatgccgttgatgcgctcgcagctgcgggtgttcatcttgtggggcatcgccgaactgcccacctggccgggcttgaagccctcggtgaccagctcgttaccggccatcaggcggatgctcgtggccaggttgctgggcgcggcagccgtctgggccagcgcggtgaccgcgtcgaagtcgaggctgcgcgggtacacctgcccggtgctcatgagcacatggttgaagcccaacccggtggcgatgcgctgctcgaactccgcgagcttgtcgacgtcgccgcccagcaggtcgagcatatcctgcgaggtgcccaccggacccttgatgccccgggccgggtagcggtcgatcaggtcgctgagccgggcgtgggccaccagcagctcgttggcgcaggtggcgaagcgcttgcccagcgtggtcacctgggcggccacgttgtgggtgcgtccggcaatcggctggctctcgtagcgggcggccagctcgccgagccgggccagggcggtgacggcacgcgagcgcaccaactggagcgaatgcagcacctgcagctgctcgatgttctcggtgaggtcacggctggtcatgcccttgtggatgtgctcgtagccggccagcgcgttgaactcctcgatgcgggccttcacgtcatggcgcgtcacccgctcgcgggcggcgatcgaggcgaggtcaacctcgtcgatcaccgactggtaggcgttgatcacctcgtcggggtcgtcgccgccgaagtcgacgcccaggtcgcgctgcgcctcgagcaccgcgatccacagcttgcgctcctcgacgatcttgtgttcgggcgaccagatgtgcttcatctgggccgacgcataacgggtggccaacacattgggaacggtcatgggtcctccttgcggacagcggaaagggtcagctgagttggtcggcgatggcggccaaccgttgcggcgacgcgatgtcgcgtcggcagaagccatcgggaaaatcaatgcggtcaacggcggcataggccttggcgcgcgcatcggccaggtcgatgccacgggcgaccaccaccagcacgcgtccgccggccgagaccagctggccgtgtgcgtccagggcggtgcccgaatggatcacctgcacatcgtcatgggcgggcggcagcttgatgacgccgccggggtgcgggtcggtgggatatccggtggatgccagcaccacacccactgcggcaccgggccccaccgtcagcgccggtgcatcggccagggtgccggtggcggcggccaacaacacccgggcgaacgggccctcgagcagcggcagcaccacctcggtctccggatcgccgaagcgggcattgaactccaccacgcgcggcccggcggccgtgagggccagccccacatagagcagcccggcgaagggcgtccccagctcgcgcatgcgctccagggtgggacgcaccacctgcaccatcacctcgtcgaccacatcggccggcaaccacggcagcggcgcataggagcccatgccgccggtgttcgggccggcgtcgccctcccccacccgcttgaagtcctgggccggcagcagcggcacggcgctcgtgccgtcggtgatgacgaacaggctcagctcgggtccgtcgaggtattcctcgatcaccacctggtcgcattcggccgcatgggccagggcggcagcgcggtcggaggtgacgatgacacccttgccggcggcgaggccgtcgtccttcaccacatagggcgcaccgaactcgtcgagggcggcggcggcctgtgcgggggtggtggccacgcgggactgggccgtgggcacctgcgcgtcggccatcaccttcttggcgaacgccttggacccctccagctgggcggcggcgcggctcggcccgaaacaggcgataccggccgcgcggacgtcgtcggcaacaccggcgacgagcggggcctcgggccccacgatcaccaggtcggcaccgatcgaggtggccagggcggccacggcgggcccatccatgatgtccaccgggtggttggtggcgaaggcggccgtgccgggattgcccggggccacgtgcaccgcgcccacgccgggatcatggctggcagccagggccaacgaatgctcgcgtcccccggcgcccaccaccagcacggtgagcgaatcagctgtgggccgaatatggccggagggggacgaatgcgtcgaagaaccagtgctcggtgcagtcacgcgggaagtctatccgggcaccacaggcgcggacggcagtgcttgcgatgcgtccgagccgtgcccggcgccgttccgtgcacggcgcccggcacccggtgaaccgccggcaatggtgaacgcatggcaccgcgacagcccgtctccggtatggtcacctcggcccgcactaggaggcgcgaatgatcaacttcctcgtctcatatcccctcgtcaccatcatgggggtgctgtcgctgggggcgctgctcggccagatcaagttcggccccctgcgcttcggcgccgccggcgccctgttcgtcggcctgatggtgggcatgctcgatccccggctgggcgacggcatgaccctggtgaagtcactgggcgtcggactgttctgctacaccgtcggcctggccgccggttccaccttcctgtccgacctcaagcgccagtggacgctcatgctggccggcgtcgtcggcctgttgctgatggccggcttcggcgtgggcgtcggcaggatggtgaacctgtccagtgggcacgtggccggcctgttcgccggggtgctcacctcaccggccatcgacgcggcccaacacgccaccaacaactcccccgacaccctggtgggatatgcggtgtcgtaccccaccggcgtgatcgtggccatgatcatcgtcgccatggtggccaccaagcgctggcccggcaaacgcgacaacacgtcgatggcagaagccggcatcaccgccgtgagcaccctggtgacccatgacacccgcatgagcgagatccccgggtggccctcccgcatccgcatgagctacctgcgtcgcgccggcgagatgcgcctgatcaccgccgccgactacctgcaccacggcgacatcgtgctggtggtgggcatgcccgacgacgtgcagggcgcggtcgagttcctgggccatccctccgagatgcgcctcaccgagaaccgccgcgacgtcgactaccgccgcttcctggtgtcgaacccgcaccttgccggacgcaccatcggcgacatcaacgtgcgcagcaacctcgacggcatcgtcacccgcgtgcgccgcggcgacctggagatgctggccaccgacgacctgatcctgcagcccggcgaccgcgtgctggccgtggtgccgcgcggacggatgggcgacgcgcaggacttcttcggtgactcggagaaccgcatctcgcagttggacgccctgacgctggggctgggcatcgcgctcggcctgctcgccggggccatccgggtgccgctgcccggtggcatcaacttcgagctcggcagcgccgcgggcccgctgatcgtcggcatggtgctgggcgcgctgcaccgcaccggcccgttccgctgggacctgccccacgcgaccaactcggtgttgcgccagatgggcctcatgatcttcctggcatgcgtcggcctggccaccggtccggccttcctgtcgcaggcgttctcgctgatcgggttgaagatcctgctcgtctcggcggtcgcactggtactgggcgcgctggtggtgctcctcggagccaagtggctgggcctgtcggcgcagcgtgcggcggggggctttgccggattcgtcggccagccagcggtgctgggctatgccaaccagctggtcaacgacgagcgcatcgactccgcctacggggcattgttcgcgctgggcacggtggtgaagatcctgttggtgcaggtcatcccgctgctgttgtagccggctgccgtggtgaccgcccccagacatgcgggttgagaggcgcgcgggttgcggggtgcgcgagttacggaaccgttcgctgcatcggggctaccccgccgggtcgccccgacggggcatccacccctggaacaaccggatccactgcccaaggctctgattcgaacggcactggatccggtcgtgatcggcgtcgctgacgggcgatgccatcaaaggtgatgttcccgcgccatcagcagcaccgagctgtgctggtcccacgcccacccgcctccgcggtgggcgtgggatcacgttgttgtgttgtctgccatggcctgtcgccaccgggccgtacagtcaccttcccatggcgccgcacgcatcatcagcttcggcaggtgcgcctggcgggggacgccaacacgcaatcagcgtccctatagatgaaaggtaatctctttcagggaatctggcgtcggacaactacatcgtcttacattgcgagatggtcgctgcggcacgccgtctccggacctcagccggtggtcacctggctggtgggcggtgccaccttggggctcaccgaattccactggctcatgtcataggtcttggtctggctcttcatggcgctgggcagcatcgtctcggcatcgatcaccagctgcgtgccggtggccgactgcagccggtaagcggccttgttgttgacggtgattgattcagagctggtgaaggtggtggcgtccaggtcgctgaccagttggtcgcgcaccttcgacggggagtactcggcaaacgcctcgggccgggtcgaattgccctgcgcccacttctgcgagagcgcggtggcatcatcattgggcaaccccacgccggtccagtaggttacattgcccttcacatagcccttctggtcgacgatcagcacattgagcgacgccccgccggcatagctgttggcgagctggtagttggagtcgtcgaactgtccctccaccgaggtggtcgtcggcacggacgccccgctcgacgaactcgccgaacccgtctgcgtcaccgcgatgcgccccgacgtggccttcttgatcgctgccacagcctctccggccaccatgctggcggccttagtgggcgccgcggcgaccggagccgacgacgacgcgccacccgacgagttcccaccgcaaccggcgacgagcgtcaccgacagggcagcacccacgacgaggaccaatggacgtagcttcatttctctcctgcgattccttgggacgggcatcatgactggccgatggggctagctgaccttcacgatctgatcctcgggcggcgccgtcttcagcggcacggcattccattcactgaggtcggtggggaagctgcgcgaggaaaccttcacatggcttggcagcatcgtggcggcgtcaatcaccacctcggcatcaccatttgcgcgcagcctgaacacctgacgaccgtcgcgggtgtcctgctccacctccttgaatccctgtcccctgatgtcggccacctgttcggcgatcaccgtcgacggctccagcttgttgagcgtggacccatcgatcatcgcctgcttgctcacccacttgcccaccaaggtcctgcgcaggtcctccggcgagccggccgaagcccaataggcgtcattgccctgcaggtaggtctggtcgtccaccaccagcacgttcacatggctgccgccggccagcgagaggtcggagaggtagttcgcgcccgtcagggagccctcactgaccaccgagaccggggccgcggcgctcgcggaggcacccgccgaaccgctggcctgcactgggctgctggaaccctgcacctgggcgacccgcaccgaggtggcctgctgcatcgccttcatcatggcgtcgatcacctcgccggcggacttgctgggcgacgcactcgacgacgcggagctggccgacgagccggcaccgctcaccgccggcttggccgagcacccggccaccaggccgaacgccagcgcacagctgccgaggacaaccaagggacggtatttcatccttctcctgcgggtaggtgggtcgggcacgtcgcagcgggccggcccgcgtggacgatcagcctgagtagacgacggtctggtcggcgggcgggacgacctgggtggccgcgttgttccacttctcgaactcgaaggtgtcggggtggttgctcagcttgatgtggatcgggtacatcgtggcggggtcgacgtccacctccgagcccttgtcattggtcatctggtagaccttcttgccattgcgcttgacgatgtcgaccttctggaaggtgtcggcctgcagctcggtgaacacggtggtgagcaccttcaccggggcggtgttcttcacattgtcggcagtggtgttggggtcgtcgctgacccacttgtcggcatacttcgccaccgtggcgccgtccacgtcgccgttgagctgccagtacttgtcgttcgccttggtgtacaccttgtcgtccacgagcaccatcgacactgaatagccggtgctgaagttctgctcgaagagcatgttcgagccgtccatggtgccctcgaccacgaagttctgggtggcgtcggcgctcgtcgggtccttctgggcacccgagtcggtgatgcgcactgacttcgtggaggcctgcgagttcaccgcattgcccatgtccttggtgagttcctccacgctgcgcgtcggcaccgaggccgtggcgcccgtgctggaacatccggcagcgacgaggctgagcgccatcacgccagcgcacatgagaacaacgggacgacacgcatgatgctcctgatcggcaaggggtggcacgcatcgtggcgatgcgcacgccatatttccaccccgactctatccgggcagcttgtgacgacgatgtcagcggtgcggcttgtcgccacggcgacggcgccggtcggcgggtcggtggacggatgggtgggccaccccagcgcaccggtccacgtcagtggggccggatagagtgctgggggcgcaccacagcaccggaacacatcacagcagtccccacatcagaacagaaggcggtgagcagcggcatggccaagtcgtccccatgggcccccttccgcattcgtgcctatctgatcctgtggctcgcccagttgggcgccaacatcggcggctggatgcagaccgtcggtgcgcagtggttcctggtggaggtgggcgccagcgccgtgttcatcaccctggtgcagaccgccaccaccgcgccctccctgctcttcgggctgccggccggggtgatggccgattcctacgaccgtcgccatgtgctgctcgccgcgaacctgatcgccgccggggcaagcaccgtgctggcggtggtgtcattcctgcacgtgctcaccccggtggggctgctggcatgcaccttcctgctgggctgtggcatggcgctcaacgccccgacctggcaggccgtgatcccctcgctggtgcccaggaagcagatcccggcggccaccgccctgggctcggtgaccatcaacgccgcccgcgcgctggggcccgccttcgccggtttcctggtggccctggccggcacctcggccgtcttcgcggtcaacgccgcggcctatgtgctgtcggtggtggcggtgctcacctggaagcgtccggccaagcgggtgggacgccgcgaacccttccgttcggcactgttctcgggcatgcgctacacgaaggccgcgccccatgtgaaccgcatcatgttgcgcacggcactgttcatcgtgccggcgtcggccatctgggcactgctgccggtggaggcccatggccgcctgcacatgggttcgggtggctacggcgtgctgctggcctgcctgggcgtcggcgcattgagcggcgtgttcgtgctgccatggctgcggcgtcgcatcagcagcaacaagatcgtggtggtcgcctccatcgcctacggcgcagggacggtcggggccgccctgctgcccagctggggcgtcggcgtctcgctggtcgtcgcgggcatcgcatggatgtgcaacttcaccaccttcaactcgctgctgcagctcaccctggcgccctgggtgagggcccgcggcatggcgatctacctgctcatcgtgatggccggccaggcgctcggctcacccctgtggggcaccatcgcgaccctgtggacggcccaaatctccttcctggtggccggcggcctgctgttggtgttcgtgccgatttcggtgcgcttctggccgatccggccgcgcaccggcgagctcgaccgcagccacgacctgatcacccacaacctgtcgatggccaacagcgtcgacccgcgcaccggacccatcgagatccaggtgagctatcgggtgcatcccgacaaggcaccggccttcgtcaccgcaatggacgcggtgcggctgtcgcggatgcgcaccggcgccaacttctgggagctgacgcaccggctggaggaccccggcctgttcttcgaacgctattcggtgcccagctggggcgaatacctgctgcaggagacccagcgcatgaccggccacgaccgcgccaacctgcgcgcggcactgcgactcacctccgatgagccgcgggtgcgccgcgagctcccggccgacgccccgattgccggggtgccccggatgcccgacgacgaggatcacccgatgggcgacctgcggcccagggatccggacatgcccccggccgagaattcgggcacgcagaactcgggccggcagaactcagagcggcaggaaccgggcacgcaggaaccgcctgcgggcgatcagacggcctgagcttcctcgggctgggctcccgccgggctgggcttccgtcgggctgggcgtcatcgtcccgggcttcgtcagcctgggcgtcattggcacgggcgtcatcagggtgggcgtcgttggcccggacttcgccgggcgtcaggctccccggcttcgcgttggccgcacgcccccggctgcggcctgcgccgcgcccggactcagcgcaggccctggcgcaccgggcgtccgcgccagtaacccaccagcgacaagatgatgatgaaggccagcgtgcccagcgtcagcgcctcgaaggccccataggacacgcccgaggcctgcgagaagtcatagggcaggccgaacagccgctcgagggtgcccgggaagatcgacgcccacgatccgaaggccaccagggccgtggtgaccacgcacatggtgacgaagaaccagttgggccccgccctgaacggacgcaccacatcgggttcgtgcaggcgcagccgcatcgcggccgggatgatcaacaaatagctgaacaagtaggtggtgatcgccacgcccagcaccacgtcgaacagtgccgccgacgagccggtgagctgcatcgccgccagcatgaacacggtggacacggtgcccgacagcaggttgacgcggatcggggtgcccaggcgcgggctgaagcgtccgaagaaaccgccgaagaaggaaccatcggccgcagccatggcctgcatgcggtcgctcatgatcatccatgcggcaccctggccgatattggccagcgtgaacatcaccacggcaagcaccatcatcggcttggcggccggcccgtacaccgagaacacggtggccacggcattgagcaggcccgacaccccgtcgatggagctgggcggcaccaccaggatgatcgcgaacaccggcaccaggtagaagaagccggccatggccgaggaccgcatcaccgagacagccacgtcatgcggggcgttcttcatctcacccgacgcgctcgatgacccctcgaaacccaggaaggcgaagatcagcagcggcaccagcgtgatgaatccggcgcgggtgggtgagaacgagccgagcgtgatctgctggatgccgttcgtggcgccgtagatgatggcggtgatcacgaagaaactgatgaaggtgagcttgaggatcgcacccacggtggggatccacttggccttcgccagcgagaggatcgccgccagcaccgtgatccagatgaagcacagcttgaacgcatagtcggccggcgaaccctccgcgaagtgcaccaggtggttgcgggccgcctcggcgttgaggaaggccatcgaaccgcccacccacacgggctgggtgatccaggtgaaggctgatgccacggcggccaccgggcgtccgaacgcgcgacgcacccacaggtagacgccgccctcgccggtgaaggccgagccggtctcggcgaagatcagcgcataggggatcacgaagatcacgatgagcacgaccagccaggtgaaggtctgcggaccctcggcgctgaccgagccgagcatctccaggccgaccacggccgacacgatgaggaagacgatgtcgaagcggctcagcgtgcgctgcagacgagtggtctgccgatcggccatccgggtattgacttcctgatccgacctggccacgtgttccttccccggccggtgccgtaccgaccacggggaatcgtagtgggcctcaggcatgtgtgtcgtacgcgtcccatggtggtggcgtcgggggctggcggacgcgctgatgtgaccgctaacaggacacctgtgcggcgtcattgccgcacaaccgcccacccagtgggggcgctgtgtgcaccgggtacaccacgtacacccaagcaggccgcggccctcacctaggctggtgcaccatggcagtagtcgtatgcggcgaggcgttgatcgacctcatcccggacaattcgcgcgccggcaccacgcagtcgtcgtactggcaggcgcactcggccggcggacccctgaacacggcggtggcactgtcccgcctcggaatgcccacccgcttcctgggacgcttcggcatcgacggcttcggcgcccagctgcgcagccacctgcgggccaatggcgtggacgattcgctgggcgtgcagacgctcgccgggtcaacgtcgttgtcggtggtctcggtggactcctcgggcgctgcccgctatgtgttccacctgcgcggcacggccaacttcgggtggaagcccgaggagttcccgcagctggatgccgacgactggctgcacaccggatccctggtcgccaccgtggaacccggccgctcggcgctattggatttcgtgcgcaccacgcccgcccacctgtcgtacgacctgaacgtgcgccccaccgtcgaacccgatccggacgcctatctggcgctcatcgatcccttcgtgcaggtggtgagccaacgcgggggcgtcgtgcgggcctccgacgaggacctgctgtggctggccggcggccacggcgagatcgacgacctggcccgcgccgcggtggagcgctacggcatggacctgctcgtggtcaccctcggcgcacacggtgccctggccaccggcgtgggccgcgagacggtgcgcgtgccggggttcccggccgccgtggtcgacaccgtgggcgccggtgacaccttcaccgccggcttcctgcagggctggctgcgcgacgccgacctcaccgccgccctactgcgtggatgcgccgcggccagcatcgtctgcacgcgggtgggggccgatccgccgaccgccgccgaggtcgatgagctgctggccgctggtcccacccgcaccgacccgccgcccgacaccgcctgaccgctggtcatcgccgaacgtctgcgggcgctggtccatgtgctggtccgaccccggagcggccccccggcagaccccgatggccgatcgggcgtccacacaggaaactcatcgtgaacaccttggatgcgcgctgctggtcggcctactctcatgattgtgggaatgcgatttgtcagcaccgcggcaggcgccgctgccgtcatcctcggcggctggatcgccgtcatgcgcttcatccccgaaatcgggggcgtcaagcgccacgacctcaacaaatggctggccatcgacaccgccgaagtggcgacgctggcgggcctgtcggtgacggccgcctggcggcccagctattcgcatgtgtgggcgctggccggcaccgccctggtggtcggcgacgcggcactggacgtcagcattgccaagcccggccccgatcgtgatcgtgccatcggcatggccgcactcatcgaggtgccctcggcgttggccctgggttcctggaccctgcaccgggtgatcaagcgccgccgcgcggcgcgcgccgcctagtcggccttcggaccgctcggaccgcgatcttcgctgctgctcgcctctggattgccgccagcggcggcgcccttttcggccgccttgtcccccacggccttgccctcggctgactcgtttccggattcgccgcccacagccttgtcccccacggccttgtcccccgccttgcctgggcctgactcgttcccggcctcgccgtccgcggcctttgccgcttcgccctgcagctcgtccttgctccccacaggcgttccatcgcccttggtgacggcctcggcggcggcgacacccggcaggtccttgcccacggcccgcgtcgcatccttgctgctgaccctgtcgtcgctgtcctcgtcctgaccatcccgtaccccggcctcacggcgcgcgttctgctcggtggcctccaattcggtccacttgcggctctggcggcgccgacgtccgaagctcggcagggtgaggaacgcctcggcccgcaggcaggccacggccacctcgatgagcgagcccggctcgtagcagatgtagcggggctgccagcgcggctggtacttcacattcgagcgatacaggctgtcgagctgcaggaagcgcgacaggaacatcagcacgttgtaggccaccttcgtcaccggatctgcgcccaactcctccccgcgctggaagatatcgcgcagcacggcaaaattcagcgaaatatgtgcgaggtggttgtcgcggccccagtcgaccaggccggtgaccatcgactcgaccacgccattgggcgcctgcgggctgcgtcgcatcaggtcgagcgacaggccgtccttgccccagggcaccatgtagagcaggccgacgatctggccgtccacccgcgcccgcaccagcacgcattcgccgtcggccgggtcgccgaagcgtcccaacgccatcgagaagccacgctccacggggccgtcgcgccactcatcggcgcgggtgcgcacctcggccacctcgagggcggacaggtccttggcgcgcaggcaatcgaccaccacgccgtcccgcttggcatggttgacggtattgcgcaccggcttcatcacgcgtccggccaggctgaagtcggccacgtcgatgatggcctcatcgcccaggtgcagcacctccatgccacggtcggcgaacaggcggccggcctcctcaccgcaggccagcacggcgggcaaccagccgtagcggttggcctcggcgatccaggcgtcgacgacttccccccactgcccgggctcaccgaggggatcgcccccggccaggctcacaccgcccaccacgcggtagctgatcgcggcccggcgcgacgcccccaccatcacgccacggtcgcggcgcgtcgcgaaatagtccagggagccgatgcgggggttcatcggcaggatcgaccgcagctcgttctcctcgtcgggatgcagcgagtggggcccgttggggctgcgcaacagcgccaccaggatcgtgatgatcacgaagacgccgatcatgagcatcgcgaagaaccagcggtcgtcccagtgcggacggatgaacaccaccggcccggagatgccgaccatgccgacgactgtctcgacgatgcggtcgaccagcgtggtgtcatgggcctgggtgcgtgccgtggcggtcagcagcacggtgcccagggtgatgccggccaggggcgccaggatcacggtggtccagatgctgcgtcgcgaccgcgggtcggggatgccggtgaagtggcggtgcccggccaccaggagcgcgagcaccaccagcccggcgatggactgctcgaagtcgaagcccttcaccacgtgcagcagcaccgtcatcacgaccatcgcgacggccagccaccaggcgacgcgcttgcggtgcttcaggccggtgctcagcgcaatgagcaccaggccgacgattgccgtggccaccgacgccaggcccaccacggtgggagagaagacgtcgagcaccatgcgcatgcgccgcgaaccatggggtgcggcgatcacccccaccacattgatgatgccgccgacgccgatgagcagggccagcacacgggggctggtgagccaattaccgagacgccgaaggaaggacactttgttcattgtgccccacctgccacggcgggcagacgctgggaggcggcaccccggcgggtcgtcgagggcctattcggcgctgcgcaccaggtgcaggcgccgcaggatcggccgcaggaaggcccggaattcgtcgatggcaagcagcttcacgccgatcaggaaaccgatgatgaacaccaccgcacccagcgccatcgcgccgaactgtgagatcaacgaatcggcctgcgaggcgacgaccacgcgtcccaccaggtaggcgggcgtggcgcccagcaacgaggccactgccagccgcaggtagagccagatcacccgcgccaggccgatgccctccatctcgcgacgggcgtagagcacgaaaacgatcgcgagcaccgagttgccggcgatcatgcccaggcagatgatctcgacgccgtgggccgggtcgaggcgttgtgcggcgaacccgaagcccacctgcacggccgtgaccaggcactgcatccacaggttcgtgaagccgcgctccagcgcgaagcagaactgctgctggaaggtgacgatcgtgaacggcagcagggccgccgccatcaacatgagcagcggggcggtgaccgacgcctgcgccggcgagatgccccagtagatgccgcgcacgatgggccgggccagcgccatgagcaggaaggcgaccgggatgatgccgaccgccggcagggtgagcccccggtagaccaggtcgcgggcgtcgcccagccccgcgctcgcccggcgttgccaggccctggccagctgcgggaacagggcggtgaggatcgagaagccgatcagcgaatagggcatctggaacagcgtcatcgcgttctgataggccgcatagccggccaccgtcgtgccctgcggggcgcggtacatcatgcccgaggccacattggcgatgtagatgccaccggcctgggcgatgcacagggcgatgaaggtgagcgccgcgaagcgtcccacctggccgaagccgtagccgcgcagcccgaagcggggcgtgtagcggaagccgatcttcttcagcaccggcagcagcacgagcgtctgagcgacgatgcccagggtggcgctgcccgccagcgtccacaccatctgcgagctccacaccgacgggtccgcctgctggccccacaagcccaggaagacgatctcgccgccgatggccaccacgttgttgaccaccggggcccagccgaaggccccgaacgagccgcgggcattgagcagattgcccagcaccgcgaacagcgcatagaacagcacctgcggcatgcagatataggcgaaggcgatgcccaggtgcaggccggcgccctcaagttgggtggtcacccgcatcagcaccccggcgcctgcggtgcacaacaccgccaccacgaggatcagggtgagggtggccgtcagcagccggtcgacgaagtccttgccgccatcggggcgcttcatcgccttggtgatctgcggcagcaacaccgcgttgaggatgccaccggacagcagcaccaagatgtagttgggcagcgtgttggccagccggaaggcgtcagcggcgagcgcctggcccaccaccttggccagcagcatggcgttcaccatgcccagcacgcggctgaccagcgtgcccgatgccatgagcagcgaattgcggccgaggttcttgcggtcggcggcgtcgatctcgtcgtccacggcggccatattggtcatggtcatttccgtggacgtctcgtcgctgttgctggttccgcgccccaccggctgggtgggttcgtcgggctggccggatgccggggcatcggcacggggacgacggatcggtgccccgacagccgggatgcgtccggtgtcctcggccgagtgcaccgcccgctcggggcggcggctcagccgatcgatggcgccgccgtggctggacgaaccgtggccgggcgagtagtccgccgcggaggtctcctgcgggagttcggggccctgttcgggcacggggccagcatcgccgggcccgccccagcgccgtgagcgcgcgggcttgtccggtgagccttccccggcccgacgaggcctataggtcaacgccccgttcctgcgtagacgacggcctcaccattggtgtcgagcccgaaggtggtgtgcgcggcctgcacggccgtggccagcttgggcgcctcgacgatcacggagatgcggatctcggaggtggagatcatgtcaatgttgatgtcattggcggccagggcgtcgaagaacgcggccgtcacacccggatgggtgcgcatgccgatgccgatcacgctgaccttgccgatctggtcgtcgtagagcagctcctcgaagccgatctcgtccttcacggcgttcagcgcctgcacggcgcgctgcccgtcggacatcggcagcgtgaacgagatgtcggtgcgtccggtgctgacggccgacacattctgcacgatcatgtcgatgttgatctcggcggcagccatcacgtcgaaggtgcgcgcggcgcgacccacctcgtcgggcacgccgacgacggtgatcttcgcctcgctggcgtccgacgcgatgccggtgatcatggcctcttccatctgattccccttcgcgatgtcggcatgtcccttgacccaggtgccggggttgtcactgaacgaactgcgcacatgcaccgcgatgccctcgcggcgcgcgtattcgacggcccgcaggtgcagcaccttggtgccggccgcggccatctccatcatctcttcgtaggtgatttcggggatgcgcttggcggtgggcacgatgcgcgggtccgcggtgaagacgccgtcgacgtcggtgtagatctcgcagtacttggcgcccagcacggccgccagggcgatggccgtggtgtcggaggcgccgcgacccagcgtggtgacgtccttggtgtcctggctgacgccctggaagccggcgacgatcgtcacattgccctgggcgagcgatttctcgatgcgtccgggggtgatggtcacgatgcgggcgtcgccgtggcgctcggtggtgatcacgcccgcctggctgccggtgtagctgcgagccttgacgccgaggtcgttcaacgccatcgccaacagcgcggccgactggcgctcgccggtggtgagcagcatgtcgagctcacgggtctggggctgggggctcacctggtaggcgaggtccatcagctcatcggtggtgtcacccattgcggagatgacaacggtcacggcatcgccgcgctgcttggcacgggcgatcttgcgcgcgacgcgcttgatcgactccgcatccgcaaccgacgatccgccatacttctggacgatcctggacatggggtccttccgaacgatcaacggcgtcagtctaccgggatggcgacccgtcgagccggccccgcgccggtcagtgaacgacagctccgggcgctgtggcggcgcacgacccgccacgattgcccaccgtggacgcatggtgttgcccggctccctagtatttcgtccatgaccgttcgctggggtattgcagggtcgggacgtatcgcccgcatcatggccaccgagttcaccgccgcgcagcacgcggaactggtggcagtcggctcacgcagcgccgagcgcgccgggcagttcgccgccgagttcggcctgccccatgcgcacggctcctaccgcgagctgctcgacgaccccgatgtcgacgccatctacatcggcaccccgaacgcgcagcactatgccctggcgctggcggtcatcggcgccaacaaggcggtgctggtggagaagtcgatgacctgccaggtgcagcacacccgggaactggcgcgggccgcccggcaggagggcgtgttcgccatggagggcatgtggacccggttcctgccggcgatccgtgccgcccatgaggcggtcgccaccggacgcatcggcgacatcacctgcgtgcagggcgatctgttcgcctaccgggccttcaatgccaccgaccggctgttcgcgcccgggctgggtggtggcgccatgctcgacctgggcgtctacgcgctccatttcgcgcaggacttcctgggtgagccgatcgccgtggattgcaccggccagctcgccgagacccgggtggatgccagcgcgtcgatgcagctgcgctacgcctcgggcgccaccgcacagctgagcatctcgctgcaggcccacggcccgggccgcatgaccatcatgggcaccgacggcttcatcgaggtggagccgcgcttccaccacccgacgagcatcgtggtgcaccgcgacgacgacgagcccgagcacgtcacgctgcccttccccgggcgcggctaccgcctggagctctccgccgtgagcgaggccatcgaggccggcctcaccgaacaccccttcgtgccactcgatgactccatcgcggtggccggcgcgatgacccacgcgctggagcagctcgggtaccgcccgctggacgacgaggacttctgagggcctgccgcaacccggggcaacccggaacccacacaacagaacacacaacagaagatgtcccgccgcctcctggcgacgggacatcttcttggtagttctgcgccctgcttcagatcatccggttcacaggggctgttcggccttcaccacgcgcaccgagacctgggcctcgtcgtcgctgcgccagcccggttcgggggtggcctcgcggtgcatcgacgtggcgagcacctcgccggcgatgaagtcggcatgggtctcgatggccctggccagctcgtcgtcgggtgacgaccacgccaggtcgatgcggtcggacacgtccaggccggccgccttgcgcgactcctgcacgaagcggatcatctcgcgggccctgccggcactcaccagctcgggggtcatcgtcaggtcgagggcgatggtgtcgccctgcacatcggccaccgaccagccctcacgcggacgctcggtgaggaagacgtcatcgccactcagctcgacgtcacccacgccgtccacggcaagggtcgtgtcgcccgcggccagctgctcggccaaccgggccgcatcggccgacgcgatcgccttggccaccacgggcgtctgcttgccgtagcgcttgcccagcgcccggaagttcgccttggcgctgtactccactacgtcaccggccgacgcgaaggaatccagctcctccacgttgagctcggaggtgatctcccccacgagttcgctgtcgagcttcgccagcgcggccgaactcaccagcgcgcgcgacagcggctggcgggtcttcaccttcgcctcggcgcgggcggcgcgtcccacctcgaccagccggcgggcggtctccatggcgtcgtcgagctgtgcgtcgatgagcgcggtgtcggccttcggccaggtggtcatgtgcaccgactcggcggcaccgggcagcgtgggtcggaacatgtcctgccacaccttctcggtgatgaacggcgccaacgggcacatcagccgcgtgagcacctcaagggtctcgtgcagggtccacagggccccggcgtccccgtcccagaagcggcgacgcgaacggcgcacgtaccagttcgacatctcgtcgatgaagcccgagatcagcgcgccgtagcgctgcgtgtcgtagttctccagcgcgtcggtcacgtcgacgaccagctgctgggtggccgaggccaaccagcggtcgagcacctggcgctgggccacctgcggggcatcgccatcgggcgtccagtcgttggcccgggcatacaggctctggaaggcgacggtgttccagtaggtgagcatcaccttgcgcaccacctcctgcagcgtggtgggccccacgcgacgcgccgaccagggcgatccggcggcggccatgaaccaacgcaccgcgtcggcaccgtggtcgtccatcagtgggatgggcaacaggatgttgcccaggtgcttgctcatcttgcggccgtcctcggccaggatgtggcccagacacagcacgcgcttgtaggccgattcgccgaagacgagcgtcggcacggtcatcatcgtgtagaaccagccgcgggtctggtcgatcgcctcacagatgaagtcggccgggaaatgctgctcgaacttctcctggctgccctccacccacgggtagccccactgcgcgaacgacatcgagcccgaatcgaaccaggcgtcgatcacctcgggcacgcgacgataggtgccctgctcgccgtccagctggaaggtgacatcgtcgacgaagggacgatgcgggtccatgtcggccaggtcgggattgcccgccagcttcgccagctcggcacgcgaaccgacgcagtacagcttgtcggtctggtcattgcgccagatcggcagcggggtgccccagtagcgggtgcgcgacaacgcccagtcgatgttgttgcgcagccagtcgccgtagcggccccacttgatcgactcggggtgccagatcgtgttctcgttctggtcgagcagctcctgcttgcgctgggtggtgcggatgtaccagctcggctgggcgtagtagatcagcggcgtgccgcagcgccagcagtgcgggtaggagtgcttgtacatcacggtcctgagcaggatgccgcgcttggccaggtcgtcgatcaccttcggatcggcgtccttgaagaacaggccaccgaccaggggcaggtcggcctcgaaggtgccgtcggcacggatcgggttgatcaccggcaggccgttggcacggcccacctccatgtcgtcggcaccgaaggccggcgcctcgtgcaccagcccggtgccgtcgtcggtggtcacatagtcggcggtcaggatgtagttggcgcgcttgtcgaagggcacgaagtcgaagggacgctcgtagtcccagccggccatcgccgcgccctgcttcttgtccaccacatgccagaccggcttgccctcgtcgtcgtgctcgccgagcaccgcatcgaacagcggctcggccaccacgagctcctcgtggccgttggacgccagcacatagtcgacgtcgggggccacggccaccgccgtattggagatcagcgtccagggggtggtggtccacacggccagcttggcgccacgctcggcccacggccccgacgtcagcgggaaggcgacgtagatggacggttcggtgacctcccggtagccctgcgacacctcgtgatcgctcagcgcggtctcgtcgtgggggcaatagggggtgacgcggaagtcctgcaccagcaggccgtcgttgaagatcttctgcagcgcccaccactcggagtcgacgtattcgggggccatcgtccagtaggcctcgtccatgttgacccagtagcccatgcgccgggtgagttcggcgaactcgtcgacatgctcggtgaccgattcgcggcacttctcgttgaagcgcgcgatgccgtattcctcgatctcgttcttgtgatcgaagccgagttccttctcgacggcgagctccaccggcaggccatggcagtcccagccggccttgcggtcaacgcggaagccctgcatcgtcttgtagcgggggaacatgtctttgaacacgcgggcttcgatgtggtgggtgccgggctgaccgttcgcggtgggtgggccttcatagaaattccagcgcgggccgccctgggtggcctgccacgacttggtgaaggttttctgtgcgtcccacatcgcgatgatctcgtggtccatcgcaggcaggtcgatgcgtgccggcacggcgcgataactgccggcggaagtgtttgcggcgtgctcgggggtggcttcccgtgtcgagttgcttgcgtgttcggggttggcggtcatcgttcctcttcgctgtccacgtgctcgacgcttctcgccgggcacgtctttcacgaagggacgagttcgcgtgacgtgatgcgtcacggtggcccgcggtaccacccttcttggaggcgtccgcacaccctggggtctgggacgttcccgcttgcttgctggtcgctgccggttctactgcgccctgcgggcggttcttccggcggctcgggagtgatggctccgtccacgctgtgcgactggctcaagtgtagaccgccgcgcgaggtgtcttgctgtcacgttcacgccctggttcacccaaacttcgggcaccgatgacgtgaggttgcccgcaagtttcggacagttggttctctatgctgtgagggccaggctggctgcctgggaggcttcgaattcgactggggtctggtatccgatcgccgagttgagtcgtttcgtgttgtagaacccggtgatccatcgctcgacaccatgaatggcctctgtgaccgtgtcgaacgtgtgcctatcgtagtattcgctcttcagcacggaccactgggattcgatcatcgcattatcccagcagaccccggtcctgcccatcgactgatccaaacgcaattgctgacagcattcatgcatctgctgagacgtaaattgcgctccacgatcggaatgtatgaccacattctccgccgtgtcgcctcgaatggcccgggcccggtgcagggcggtggcgacgaggtccgtggtcatcgtcgtcgacatggccgtggagatgatcttgcgtgagcaggcgtccttgaccccgcacagatacacccagccttccctggtgcgcaggtaggtgatgtcggtgacccacacggcgttgacccggtgccggtcccagcggcgcaggcaccggtccgggatcgagtgcgtgcgcgtgcccggcagggttgtcaccggtcggaaccggcgtgggctgaccccgcagatgccctgccggcgcatcgaggccgccacggtcttgcggtcgacggcgaccccggcacgggtcaggacggcgtgcacccgcggcgccccgtaggtgcgatgcgagttcacccaggcggcccggaccctgcggtcgagacgacgtctggtgaccgcccgaggcgatgcggcagggtgttcgctcgtcttcacccacgtgtaatacccggaccgtgagacatgcagcagccgggccattcgcacgacgctgaaatgtgccttctccgcgcgcatcagtgagtatttctcgttcaccgacgcttcgacgcgaagaaggccgccgctttttccaggaactcgttgtccatccgcagctgcgagttctcacgccggagccgtttcagctcggcccgctcgtcatcgctcaacaaatcaccagcagctgtctctttctgcgcacgcacccatttgcccagcaactgctcaccgagtcccaattccttcgcgacgtccgcgatcgtgcgaccagacgtcagcaccagcctcgcggcctcgtggcggtactccgcagtgaacttccgccgcctccgcggcacctgctccggatccacacccatgacaacaccttcccgcacgacccaccggccatgccacatcaggtgtccgaaaaaacagggtaaccccagaacgaacttgcaatgatattgtttaggctgtggataggatcacccccgcgtatgcggggagaaccgaatcgtgaacgtcggaccaccattctcccaaggatcacccccgcgtatgcggggagaacactgccggggccagcactaccgtcatgcccgtgggatcacccccgcgtatgcggggagaactaaacagcgtcccacgcggcgtaccacgcggcgggatcacccccgcgtatgcggggagaactctggcgtgtcgatcgatccgtcagatgggtccggatcacccccgcgtatgcggggagaacggcaccctgctaggccgtgaggtgaagacctcgggatcacccccgcgtatgcggggagaacagctcctcgatgatctggtgcactcgcttgcgcggatcacccccgcgtatgcggggagaactctgcccagacctcgccccatcggtccgtggagggatcacccccgcgtatgcggggagaaccacgtggcgttccacgtgtcgttccgcgcagcgggatcacccccgcgtatgcggggagaacttggacgtgccgaccaccagcccgccgccgcgcggatcacccccgcgtatgcggggagaaccacggcgctggagggcaagacaggcaattacgaggatcacccccgcgtatgcggggagaaccgtaggcgccatgtggaccccccaccccgacaaaggatcacccccgcgtatgcggggagaactctcgggacagtcgggtggtgaggcgttcaatcggatcacccccgcgtatgcggggagaacagattggaggccttggtggcaacatcctcattcggatcacccccgcgtatgcggggagaacgactccaacgtcaccgccgccctggtcgaacgcggatcacccccgcgtatgcggggagaacgacggcctgcgagcagggcgaggagttccccggggatcacccccgcgtatgcggggagaacggacgggcactcaagtcgagcacggcacgagtgggatcacccccgcgtatgcggggagaacgatcgaggcccgcttgctgggcagcgccacgggggatcacccccgcgtatgcggggagaacgctgttgctactttcttccaacttccaccgacaggatcacccccgcgtatgcggggagaacttacgggtgacctgaataaggcaatgattaccgggatcacccccgcgtatgcggggagaactctcaatgagaacgccccggttttcaatggataggatcacccccgcgtatgcggggagaacaccgggcggcaggcttgcgccatgtcaaagtccggatcacccccgcgtatgcggggagaacccggtggcgaggttgacgaggccggcgggggtgggatcacccccgcgtatgcggggagaaccatcggggttatctgtattaatttttgcaaaaatggatcacccccgcgtatgcggggagaaccacgaccagctcacatcacaggccggcgagaagggatcacccccgcgtatgcggggagaacgccaccacatcggggtgggtggcggccagttgcggatcacccccgcgtatgcggggagaacgccaccacatcggggtgggtggcggccagttgcggatcacccccgcgtatgcggggagaacgccaccacatcggggtgggtggcggccagttgcggatcacccccgcgtatgcggggagaacgccaccacatcggggtgggtggcggccagttgcggatcacccccgcgtatgcggggagaacgccaccacatcggggtgggtggcggccagttgcggatcacccccgcgtatgcggggagaactgtcctaccaaaggatcctctgatgacatgggaggatcacccccgcgtatgcggggagaacccgctagctgtacttccccgggaggttgtgaacgggtgaggtagcgaagacctccgggcaggatgtgggttaccacactcactctcctgaccacggaggtcttcgtgactcacgctaacgcacccttgacaccggaagggcgtcgtcgtcttgctgttctcgtcgtggaacagggctggtcgttgcggcgggcggcggaacggttccagtgctcgcccgcgacggtgaagcggtgggccgacaggtaccgggcagggctgccgttgatcgaccgtagttcgaggcccacctcgtcaccgaaccggctttcgcgtaagacggagcatcggatcgtcgcgttgcggttcactcgccggtggggtccgcaccggatcgcgtatcacctgcggttgcaccgttccacggtcggtcgggtgctcgcccgatacaagatgccgaagctgatcaacatcgaccaggccaccgggctgccggttcgccgcccgaagccgacacggtacgaggtcgccgcgccgggccagctcgtgcacgtagatatcaagaaacaaggccggatccccgacggcggcgggtggcgtgcccacggtcgcggatccatgcaggaccgtcacgcgggagtggcccgcgacaaggcagcccgtgccggggcagccggctctcgcggctaccggtatctgcaccacgccgtggacgaccactcccggatcgcgtactcagagatccttgacgacgagcgcaaagagaccgcagcggggttctggacccgcgcgaacgcgttcttcgcaggcctgggcgtcacagtcaccgcggtgatgaccgacaacggttcctgctaccggtcaggcgccttcgctgacgcgctcggcgacgaggtgaagcacaagtggacccggccataccggccgcagaccaacggcaaggtcgagcggttcaaccgaaccctcgccgtcgagtgggcctacgcgaagccctacgccagcgaagccgagcgcgccgcagcctacgagacctggctccatcactacaatcaccacagaccccacaccgggatcggcggccagactccctcagcccgcgttcacaacgtcacggggaagtacagctagcgggcacacagcgggcacatcagagcggatcacccccgcgtatgcggggagaacggcgactgggtgaaggagcatctgggcggtctgggatcacccccgcgtatgcggggagaacggccgccaccagatgggcgtctccaagggcctgggatcacccccgcgtatgcggggagaaccggcgggggcggtcagtgatgttcgcctggctgggatcacccccgcgtatgcggggagaaccagacgccggggccgcaggatcagtggacgtggggatcacccccgcgtatgcggggagaacccagacgagagggagtgggggacccgcccgcaaggatcacccccgcgtatgcggggagaacggcctcggggctcagcgaggcgtccagatcggaggatcacccccgcgtatgcggggagaaccacttgggtggccgatggcgtgagggctgccgaggatcacccccgcgtatgcggggagaaccggcaagccgggcgagctggtgcacctgccccaggatcacccccgcgtatgcggggagaactttcgaaaaaagatggtccccacacttgacatgggatcacccccgcgtatgcggggagaacacggcggcgagctgggtggacttcggcatcagcggatcacccccgcgtatgcggggagaaccgtagccttctccgcagctttggaaacattggtgggatcacccccgcgtatgcggggagaacgtcgtgctgtgtcggggggcgatgtcgaagacgggatcacccccgcgtatgcggggagaaccgggggagagcggctactcacccccggttcgccggatcacccccgcgtatgcggggagaactggctcgtcaaggacctgatctccgtcgaggacggatcacccccgcgtatgcggggagaactttttgcctggctttattgctggcttcggtgagggatcacccccgcgtatgcggggagaactcctgcgcgcgctcgtcatacaccttcaccatcggatcacccccgcgtatgcggggagaacctctttttacccggctgcgccaggtctgacgaaggatcacccccgcgtatgcggggagaacctgtcttcgatcgtctcgaccctggcgtcggtgggatcacccccgcgtatgcggggagaaccgcaacgccgtgtactggatcccagcgccgcccggatcacccccgcgtatgcggggagaacggcggctgtcatcatgattgtgaccgatttcggggatcacccccgcgtatgcggggagaactccacgtcctgcccgaacacccgccggaactcgggatcacccccgcgtatgcggggagaaccggtgcaggccgtgaaggatgcgggccagggcaggatcacccccgcgtatgcggggagaaccgacggatagccgtccgcatattggctcgaccaggatcacccccgcgtatgcggggagaacgaccaccttgccgcgcatccgctgtgggtgcccggatcacccccgcgtatgcggggagaacctgagcagcgcgccaagcagcgtcccgagcggcgggatcacccccgcgtatgcggggagaaccggcggcggtgatcgctgatgttcgcctggctgggatcacccccgcgtatgcggggagaaccggcttgcagggattcccagaaggcccgtgtcaggatcacccccgcgtatgcggggagaactcaacgagcggcttcgtcgtgctgttggcgttgggatcacccccgcgtatgcggggagaactttcgggctccaggtccaggatagatgtattcgggatcacccccgcgtatgcggggagaactcgaccgttctgaaccacggcatcatctcggccggatcacccccgcgtatgcggggagaactccaacaccgccatcaacgacttccccgagccgggatcacccccgcgtatgcggggagaactccttgcccgacagtctcaggccgacctcgccgggatcacccccgcgtatgcggggagaactgtggaccggatcgcggttgcagcgggtccgcaaggatcacccccgcgtatgcggggagaactccgtcgacgtagccgacctgcatggccggatgggatcacccccgcgtatgcggggagaaccggctctttgcatgtgcaagtgctcgaactcacggatcacccccgcgtatgcggggagaacgcgactcgcagaagatgacctgcgagattgacgggatcacccccgcgtatgcggggagaacccccttgacacggggattactcgggccctagtaggatcacccccgcgtatgcggggagaactgtttggggtggatggtcgtctgccctggctccgggatcacccccgcgtatgcggggagaacatggcctggccgcgggtggagaacgtgttggtgggatcacccccgcgtatgcggggagaactcgcgctcatgccgtttccttgtttgattgagaggatcacccccgcgtatgcggggagaacgatgcgtccgacaaggacgacgacatcgaattcggatcacccccgcgtatgcggggagaaccaacgcctcaccgaagaccgcacagacacgtcgggatcacccccgcgtatgcggggagaacgcttggtttcctgattggattggagttgttgtgggatcacccccgcgtatgcggggagaacctggcttggcgcggtggctgcaagagcacggaaggatcacccccgcgtatgcggggagaactcagcctcgatcgcggcggatgtgtaggtggtgggatcacccccgcgtatgcggggagaactggtgcacatcccttcctgtgttggtgttggtgggatcacccccgcgtatgcggggagaacggccttgatgtcggcctgctcggaagcgatctgggatcacccccgcgtatgcggggagaactcacccccgcgatcatcctcggggtcctcgaagggatcacccccgcgtatgcggggagaacttgcacgagttcgcgaccatcccctgcaagccgggatcacccccgcgtatgcggggagaaccaagaccgctgcggcctcgtcggagagggccggtggatcacccccgcgtatgcggggagaacactggcgacctcaatggcgaggtgggcctgagaggatcacccccgcgtatgcggggagaacggggtcttggaatcgtgcggtggttcgtcagggggatcacccccgcgtatgcggggagaacctgcctccccagatcgcgaacctcttggtccagggatcacccccgcgtatgcggggagaactcatgagctccggcgtgccggtgctccaattccggatcacccccgcgtatgcggggagaacgtcgagacgatcccccagcagtcgatggaaccgggatcacccccgcgtatgcggggagaacgacttcctggctgaccggcacacgatcgtggacggatcacccccgcgtatgcggggagaacgatggtctccaacaatggcgaccgcacccgcggggatcacccccgcgtatgcggggagaactggtgctcgatctcgaacccgacgccgctgaaaggatcacccccgcgtatgcggggagaacggaaccgccgccgccgaatatggaggccatgtgggatcacccccgcgtatgcggggagaacctgcctccccagatcgcgaatatgctggtgcagggatcacccccgcgtatgcggggagaacagaaccggggagttagcggctactaacccccggggatcacccccgcgtatgcggggagaacacagaacgcgatcaagcgtgtcataagcgccaaggatcacccccgcgtatgcggggagaacgtgcatgtggtgtcctcggagccggtcggcgggggatcacccccgcgtatgcggggagaaccgcctcgctgaccatcggacacgccgacggcgaggatcacccccgcgtatgcggggagaacgtggtggcgtgggcgtcggtcgtgtgtggcgcgggatcacccccgcgtatgcggggagaactggaaccaatcgacgaccggctggacgatactgggatcacccccgcgtatgcggggagaacacttcctgactacgcatgttactggcgctcaaggccgatacgaggacgttccgagtcagcgaccccaccgtcgtcgcttggcagcgttgctccatccggagcgcatgccactggacgcacgatccggggttctggggcgacgcatcagtttgaggccctccagatcaacaacttcccaatcgtgcctatgtactttgaagtcaaagccctgctcgttccgcgccgtgtgcaccagaattgctcgtccgtcctggcagaggtcctcaacccgcgcccaaatggcttcacgcacccgcgcagagactttgcccacaaaaactcccgggctgatctccagcagccaccgcgtcacgaacccgcgcaaaccggccgggcaggcagtgagcaccaacaccatcatggctgttcactccatgaccggccacccggcacgaccccgtccttgtcatcccaaagctcgacaatgtcccactcatggtcggagtcgtcatcggtgagcccgagcacccggtagatgtctgcgacacacctggtgagcagtttgcggtcgcgcatagtgtcacgcatcgcgcgtcggacgcgcccgggcagctcgtcgccctcgaattgtgatgccatctcgaaggccaccggtactgccacctccattttgtaaaggtcggcaatgtcatagacgaacgagcgatcgtgaccggtatgtatgaaacccaagcccggggagcaccccagagccacaaccaccgcatgcaccacgccgtacaaacacgaggtggcagctgtcaatgccttgttggccggatccgaggcctcgaaatcctgggggttatagctgcggcggtcccagtgaactttgaaacgctcagcctgatcacggtaaatctggcgcaccctagcgccctcatgtccacgcagctgagccatcgtctcgcccgcgaacacgtcgtcggggaagcgcatctcatacatccgacgggccacagtcaaccgttccggacgcttggagacagctgcggcctgagccaacaacaagcgtgaagtacgtgacagcggccgaccatggcagtagtagcgcacaccatgctcccccacccagacagctgaggaaccggcatcagccaacagactcatcgcctgatgcgttacagaggttcccggcccgaacagcacagcgccgatcatgccggccggcacatgcatcgtgccccgtgaatcctgagcggtcagtgcattgccgtcccgattgaccacgcaatgctcgagatagacgaaggtgagccgatcctgagcacgcgtcagttcgctcacttcggagggacgcacgcccgggatcggcttcgccatgatcgactaccccctagttcaaaggcgccagagtgagcagcccgcagccgtagctcttcgcgggcccgatgccatgacacaaggcatgacgcaaagcgtcgatgtcagtcacctgcagaacgcccgaatatgaggcacgcagcacggtgacttcacgcttgtcggtgggcttcttcttgaaccggagcagctcacgcgaatcgaccagtgcagtgggctcgtcaaccgtccccatcgagaagccgttgcgggcagccctggccagcagccaatcaaactgctggcctgcagtcacatgcccgacacgtttgccacgggcagccggatgcgccgggtccttcaccgcatgtaccggattggcagagagccggaatcgccagcgttgtcccatcttcagcccatccaacaagggctcatatgaggcagttcgcgtcgactcacccggcaaccacccatagctctcgacgaaacccccacaatctggctcccgaggactcaccatgagcagcgagaattcaactttcccccgttggtcgagtcgccacaaggtgcggccgctgtcgtcggcatgctcaccggggggaaagcatccgagcacggctgcatgcatgcgttcggggctcgccagcagctcacggctggcacgcttggcgggattgatcttcaatttggtgagaaacatcacgcaccctccaatgcagcgaaccaatcatcacgatcgtggccgttcgggttggcgatctgaatgtgatggctgaccacttgacgccagccgtattgccgatgtgacctcgagaagctgatcggaacatcgcgctgagttgtgccatgctcgccgggttcgctctctttgaggatttccaacagcacctcacgcggctgtcgccgctggtaccaatcggaagcctgccacggcacattcaccagagcatcatccagtggttgctccaccaccccgagcacgagttgcccggttggcgggcaactgcgacgccccagcccgattatgaacgttggatcattcaaggcgttgcgcacctcatccagcaaagctgaatcgccctccaagcccaccacgaatactgcatcagccacatagaagcgttcagtcagtgcggaattagccgccttccccgtgccggtgaggaccgtgtgaaaatccctcaccactgtgcctggctggtccactcgcgtaccgaatcgcagggcgacaaggtcttccatcgaatcgtctcgactacggcccagcgcagcagccaccattccgatgacgccactcttggtgggttcgcggcgagttccgcgcgtggcgaagcggctggaatcaccccacgattgcaacggccccgccaagcgcagcagcaggacactcatgcctgctcaccgaccaccgatggcaacacttcaccgagcttgttcatgagctcatccaaggtgacgcggtcggccacggcatcgagctcttcgcctgcattgtccgtgcggaccacgaacgatgcgaccggtgcccccacaaaattctcctgcaactgcttgtcatactgagcaagctcagagcacgatgcggcaacatatccactctccgaaccggccgtgacaggccgttcgaatgcgcccgccaagctcaacggacgacccttgcgcagaaccacaagcacggcatcgggaacggtgatgttggcgaaagtgttctgttttcctgacggcatcgacatgatgaagctgcgcacgaaagcatccgttgcctgctgcactgcctgcggatcacccaaattggtcatcaactcgcccaggttgatggcagcgtagcgatacatcgtcgaggagctgaagccgatgtcgccgatcattgctgccccgggatcatcaacgaactggtcaactgcggtgaagtagtcgctctcaagttccacagcatgggtgctgatgccatgggccacttggacggcagcgtccacgttgatttccggggcgtcagcgatcatgcggccaaaaagggcaagctccaaaccgttggcttccgccgccacgcgacgtgcttccttcttgtcaatggcatcttgtgaaccgatggccaagtcggccaaggcctccacctgtttgttgctgaagaacaccaggtagctttttttgccgtcgccttcatcggagttggcgttctccttggccttggtcgttttgatggccttccacaattccttggccagcgcttcggcatccacatctgaattttttgctttgatcgcctcggtgaggagcgcctccacctcgcgtgttggcctccctagttcgttctcaggcagatgccgctgctggaactgttcacgcacggcgcgtttcagggcttgactcgagatacgggctcgcgtcactccgccgtagacggcagttttgggggtgcctgtgtcgtcacgattcacattgttggggggaagtggctggatcacgttgatgtcgaggaaatagttgtcggtcatgcgaattctcctgatggtcgtgagtggctggtgttgatatggctgttagttggcgcggttggcatcggcctgagcagatgcctcagcaacggcgggttggtcatcggatggcagtttgcgatgcagatcacgtccccaccgcagttggacttcagctctgcggcgtgcatcgttgaggtcgtacagatcgcaagccagctgcccgtagtccaagggaatggcttcacccctcagcagggtgatcaggcggcgcagggccaccacgcgagcagcgtgatcatgtgcgccagacaaggcctcgaagcgcgtgatcgagcctgcatcccactgacctccggtgccgcgaatttgagccaagcgacgcaccgcatgaccaaagctcactcgcctgcgttctttcaccctttccgctggcggcaccttctcggcactggtatgcatcggtctggtctgggcctgctggtgggtggcataaagcacgagtgctgcatggagcgccagctccccctgcgatgcgacctcaccaggaccaatgaactcatccgggaggttcgacagtgtcatggcccacagccgtgggttggacgccgggtctgtcacgtctgcatgccgcagtgtggccaatctctcggtcccgaagctgttgtgcgccagatagctgcgctgcatgatttcgatgggccccacagcggccccatacagctgtgccagccgtgccggcctgtggccaacggcaccgggatcttgcggcttcgccgcgtcgtgtgtcatgactgctccttgtctgctgtcgtggtgttgatgagcgtgccttcggtggctttccataggttctgctggaaccgattccagcaccacgcggtgtcgatgggttcacccggcatgaaagccgcgttgattcccaattgacggccccgtgcacttcgttctcctgcttcacgacacagccccaggccaacaggccggatccgactgcgtacctgatcgcgccattgctcttccaacgcgggcatgtcgctgccattcgtcaaccccgccagccattgccggaaagccatgtcaagatctgcgtaggcacgctcccggccttggctgcgcagcattccaactagcttcttgttcgccgatgggttcgtgtattggccggcaacgaaagcgagatctttccccagatcccccgccgccactgcagcggcatccgcaacatcagccgcatgggcgatggttgccaccacccgctcgtcagtgatggcgctgatttccacgttgagtgaatcatcaacgagtcccacgatcacagaccgttcggggaacttgtattccaaaccaagcgtgcgcaatgaaattcggtctccgggcaggatgaggcctcgttcttgcaaggttgccagccacgccatcagaggcagggcgtatccatgcttgccaccccagacggtcgcctgggcgcctcgggtgagcaaaggcgccaagccacgccacatctgccgtgaagaagaatgggtgcgcggcacgaaggtgtccttcttgccgctcttgggcttccaagccgacatcggttccaagcgcatgcggttggaaatatcgaccttgtcgccgttcgcgatgagaacatcgctcacgtgttcgttggaaaaaatcaaacgcatgcgcctcgacgtccagcaatacaagtcggccggtccggtcggaacaggatgcgccatgtcagcccccgccttctgaggcgggcgctcccacacaaccgagtcatgctcagcgagcatgaccatattgagattcagcaacagcgtctcggtgagattgacaccctcagcgatcaccaagcccatggccccggtgagaccaactcccgttggatagctctttccgcccttcgtacttgcgtcgcgtttcattccggtcttgatgcccgacgaatcgaacgcctgacaatgaacgagccagcgagcggcttctggcagagacagcgactcaagggacgagttctcccgcatggagaacggagaggcaccatcgggaacgtctgcgatcagcttggggaggcccgaatagttgcctgacgttgactccagaccacccacttgcatgaatggtgcatcgggatcgcacagatcgaaacgatcgcgatactgatcgcgatacgcatacacgtcgtcggtcggcagtgttcgggtagtccaccactgcccccattggtcgataagctcatcatcggatgcatccgcgtcaatgctgcgcatgatgattgccagtagcagccgcagaattgcaacgtcttgggagcccaggtcgcccgccaacgtctgatagcgggcgctgtcaccgaatacttgagtcaacgacacttcgctcaccgtgcccgcggcgtctcggacgcgaatccagggctcatcccaaagattgaaagtggtcgtcattgcgcatctccctcgggcgttgccgacgtaccactcgccgacggatcatccttggtcacttggagccccttttcatagtcgtagtgcacagacatgcccgccaagcgggcattcaatgtgtcgtccagaaacagcacaagctgccccttgagccaataagacctctgccagccagcgaccatattgccaagaccctctgacaaattctcgagttcgtcgatcactcgatcgatgacccatccgccactgagcacgcgtggcagcaccaccgtgctagctgccacctgtctggcgatgtcacgatcgactgcgctgtcggtgaggggcgatggtacgacagtgccttcgccatgaggatgtggaatccgaatcaacccatcagccccatgcagaagcacgatgacttccagtgaatcctcactgtcccgaaccactgcacgtccctgaaccccatcatcccgcttctcaggatcttgggcttgttggggggtgaagccggtcaatgttgagctccttccgggagttttgagaagaaaatcttcggctttctcctgtgtctgggccgtgtccttaacccgctgctcctcagccatctcgaactcaggcacccagccatcgggcacatcgatggtgtcggcatatccctgggcgaccagatgggggatatcggacggcaaagtgatgcgtccggcgtccaattttcccaaaacgaacgaagcgcgcagaagagccgcggaaccgtagatcgccttgctgccagacaagaagtcgggcggtgtttccccgttccacgtactcgcaccagtcacgtagcaggttgcttcagccaggcgtggcgggcggtggcgggaatgacggtgcagacgtcccatgcgctgcagcaccaggtcgatcggcgccagatcggtgaccagcacgtcgaaatcgatgtcgagagactgctccagcacctgggtgcccaccacgatcagtttgtcgggtctggcacgcccatcacgccccagcagctcaacgagctcgcgttccttgcgagcacgctcgggagccaggaagcgactgtgcaacagccgcacctgatcgggcccgaaggcatcagccaattcttcataaatgtcctgggcccgttggacggtattgacgatcacacccgcgataccgccatcgatcaacttctcgtccaacaggcggatgattccgtcgctctcggcgttttccagctggtgaatctgcaccgtggtttgagccgatggctggtcaatactgacccatgtgacatcggaggatgcgagcgtgatgagggggtatgccgccacaggtgccgagaccaggtgctggcgttgcttgcgggttctcccgcgcacataggcgtccacaagttcctgccgcgttgccggaggcagggtcgcagacagcaaaatgaccggtgtgccataggcccccagccatcgaagaacgcgcgtcagatacacacgcatgtagctgtcggcggcatgcacctcgtcgatgatgacgactttgcccgccaagcccaggtgacgcagcaccacatgtttggcctgcaaagccatgaacagggactgatcgatggtgccgacgaccgtattggcgaggattccacgtttgctctgtagaaaccacgaatccaccctcacaacggcacctcgccgtccagcaccgtaggtttcctgctgtagctgctgaaaatcatcgttgagcccggctttgctgtgtgacagcacgagagccgaggcagatgcgacagggacggcggccagccactcggcgactcgcgtgaacatgggatttgccgtggccatggtgggcagcccgaagaaaatacccccacagccgaagcgagcgtccagaacttctgcagccagcaaggctgcctctgttttcccgccacccatgggcgcctcgatgatcatcaggggggcttcatgagctgtctttgcggcgtgcagggcagcgctttgcagcgcgttggggtgaagcccttccaaggcttggaagcgctcacccaagttggcgaagtcgtccccggggagccccgtgggaacccatgccgggggcagatccagacgacgcacaccgtgctccactcgcacactggtgggctccggctcgcccagggggaacaaccatgtgtcactggcaatccagtcggcctgaatgatgaggccctcaatgagtggcagtgcggtgctgagctgccacgatgtgacccattgggaaagccacgtttcagcaccgacggcgcgtgccatcttcgtgaagatttctgagcggacctcgccccagaccggacagcctgactcaataatgcgcaagtcagtctcacaggccttcaaagcatctttactgggattcgtcccgtggtgggcaccgatcagtgacgcaaaggcatcagcatgcacggctctgtcagaggtgagctgcttgagcatggctcgcaccgcgacctgtcccaccaaggtgtggtgccacacatggtcgaggcgagacgggaatcgaaaaccttgggactccatgcgcgtgatcagatccggcatgtcagaaccatcggccaccgccatccgagtgaatcctgccgagaccttgcccaggtcgtggatgccagcgatcagggacacaaaagcgcgtgcagattcttccccatgcccaaaactgtcagtgatgtcctgtttgatcagacgtggcaaacgatcaaacaggtgagcggctacccctgctgtgtcctgcagatgctgcacaaggggcaaccattcagctggaaggtcatcggcttcaccccgtgcccgcctggcgcgaatctcgaacgcattggtcttgccccacacagaggttgcggccggcgaccagttgatcgcgtcgagttggctgagcatctccatgatccaaagctaacagccaccaccgacagaactggcgatgtttgttctcgtcctatggcagccgggctcaggtgctctttccccagccgggctacacccggcccctaatcctcaggcgcgtcgttcacataacgcctgccgctgaaggcgcgccccagagtcacttcgtcggcatattcaaggtcgccgcccactggcagacccgacgccaaccgtgacacccgaatgcccggggtttcgcccagtagacgtgaaatgtaggtggcggtggcgtcaccctcgaggttggggtcggtggccaggatgatctcggagaccttcgggtcctgcaggcgtcgcacgagttcggcgatgcgcaggtcgccggggccacggccgtcgatcgggctgatcgagccaccgagcacgtggtagagcccgcggaattcgcgggtgcgctcaatggccatcacgtccttggactcctcgaccacgcagatggagctgtggtcgcgacgcgggtcgcggcagatgcggcagatgtcggagtcggtcacgttgaagcagatcgagcacaggtgggtgccctccttcaccgtgcgcagcgtattggccagctgctccacgtcggcctggggctggtcgagcagccagaaggcgatgcgctgggcgctcttggggcccacgcccggcagcctgccgagctcgtcgatcagatcctggataggtccgtcgtacacgtcaaagacccagcgatcccaggtcaggcatcactttctcggcttcctgtgcggccttcgaggtggcatcgcgcacggcggccaccaccaggtcggccaggccctcggcgtcatcggggtcgatggcctcgggcttgatcaccaggccggtgagcacgccaccgccggtgacggttgcctccaccaggccgccgccggaggtgccggagaagctggcgttctgtaggtcgtcgcgggcctgctgcagctgcacctgcatctgctgggcctgctcgaggagcgcgttcatgtccatgccttcaggaaacatctgatgcctttcacaagttcgccagcgtgcctgacgcgttgagtcgatgcactacgttcgctgccggtgccgcccttgcccgggccaccgcgcaccgggatgtgcggggcacgcaggccgtcggcgggccaaccggcttgttcattctacgtgggggcacccacaaatccccgggcagagccctgcggtgtggtgcggagccctgtgcggtgtggtgcggagccccgtgcagtgtggtgccgtggcggtctcagccgtgctcgatctcctcgatcacctcggcgtcgagctcggagatgatcagctccgcggccgacttcccggtctcgtcgacgttgggatcgctcatgctcacatcggcatcgggatcgtagggcggctcgtcgtcgggcgggggcacctcccagcggatctcatggtggggctccggggcgcgaccggaagcaccgggtgccgcggcgttgttccgggggcccgcgtgacccgccgcctgcggcccgtcggtggatgttccatcggtggttgaggagcgtgtgccggacccgttgggaccagcacctgctgaaccggcaccgttcgggccggcattgggtgaaccggtcccagatgggccagtcccaaatgagccagtcccgtgtggatcgggctggcctgcgtcgccctgcggcgtggcccacgggtcccaccccggatcgcgctgctcggtgggcatcgacgacgcgacctcgccgagatcggggatcacatggcgacgacggccattgcggcgggccggtgcagcgtcatcgggaactcccgtcgctctatggctcccgtcatccccgggggatccggcttgcgcggcgcgttggcgcgggacctccggcggatcggccaggtgctgatccgcgtcatcccggtgttgctgcgactggtgttgctgcgacgagccccccgcacgctcgccgccctcagctggggggccttggtggccgccttcccgcttgtcggacgccggttgggccggttccgatgggccggttcccgactgatcaggctccgcctgaccgggggccggacgttgcccagccccgggttgccgctggggcgcggcctggtcctggggcgccgaatgcccggctggtgcctcgtgctgggtcggcgcctgctgctgggcgggtgcctggtgttgggtcgatgtcgggtgttgggttggcgcctgttgttgggtcggcgctgggcgctgcctggcaggttctcccccacgcgcctcgttcatggcggccgtgccctccaccacgcagtggatcggcaggtcggcgccgagcacgtcgatcagggcttcccgcagcacgtcgttggagccaccgttctggaagctgtcccgggcgccggccgagttgaaggccagcgacaagccgtcgacgtcggcctgcagcacctgcgcattctggctgagcagaatccaggtgaagcgacggcggcccttcaccgcagtgagcacctccggccacagcctgcgcacctcggcggtgttcaggcggccggcagcggaggaaggagcctgcgccgggaacgaatcccccgacgacggggcttgcgcacccgtggcctgcggggcgggcccggccggcccggcgttgtcggcgcccggggcgttgtcggcgttcgtattgaccccggtcgctgcgccatcagcggcggtggcgtgcgatgtgccggcgttcgggctgtccccgaggttgtcggtcggcgcagggtgatcggacgcagcctgatcagacgcggcgataccgggcccggcgctggtgggcccagtatcggtgggcccagcatggccgcgagaagcgttgccgggcggcgtcgcctgcccgtcaggcgcggggccggcagccggacgctgctgacgggccgcgccggacgccggtgcggccgtctgatcggtggcggggcgttgacgggccgtggcggcatgaccaccaccggtgggcgcaccgacacccatgccggcggcggtaccgggagcattgcccatctgggtctggttcgctcggtcggcatagccgggacctgccaggcccacaccgctgagccctgaaccaccgtcgcgcacggagcgctgtcgggtgcgggcaccctgctggtcgtcgacgccgggttgggcgtcggcatgggggcctcgactgacattggcctggtcgtcccactggggtggcgcgggctgctcgacggcgggctcctcggccacgccgggcattccgacgcgacgttccagccggtcgaggcgcgcgtgggtgccgcgtccgtccacgtcggcgccgggaagcaggatgcgtgcgcacatcagttcgaggtgcagtcggggcgcggtggtgccccgcatgtgggtgaggccgctggcgatcacctcggcggcccgcgtgagttccccgggcccgatcagtgccgcctggtgttcgaagcgctgcgcctggtcggcggccacgtcgatcaggccggagctcagggcgtcgggcacgtcagccacgatcaccaggtctcgcagccgctgcaacaggtcctcggcaaaccgtcgcgggtcctggccgatctcgatcaccttgtcgatggtgccgaagacgcccttaccgtcgccggcggccagcgcgtcgaccatctcgtcgagcagggcatcgggggtgtagccgagcaacgaggtggcctgctggtaactgacgccgtcggcgccggccgagccgagcagctggtcgagcaccgacagcgagtcacgcaccgatccggcgccggcacgcaccacgagcggcaggacgccgggctcaacctgcacgtgttcctcgacgcagatcttctcgaggtagtcggtgagcaccttcgggggcaccagccggaagggatagtggtgggtgcgcgagcggatggtgccgatcaccttgtcgggctcggtggtggcgaagatgaacttcacgtgcggcggcggctcctccaccaccttcagcagcgcgttgaagccctccttggtgaccatgtgggcctcgtcgatgatgtagatcttgaagcgcgattgcaccggtgcgaagaagatgccctcgcgcagctcgcgggcgtcgtcgacgcggccatgggaggcggcgtcgatctcgatcacgtcgatgctgccgggccccccggtcgccagttcgcggcagctcgtgcaatggccgcagggagtgggcgtggggccgttctcacagttgaggcagcgcgcaaggatgcgggcacaggtggtttttccgcagccgcgcgggccgctgaacaggtaggcgtggctcacccggttgttggcgatcgcacgctgcaacggcagggtcacatggtcctggccgatcacctgctcgaaggtgtcgggacgatagcgccggtagagcgccaggggcgcccccgggtcgttgtcgggcgcaggcgcatcgggcgtggcagccaccggggcatccggcgtcgggatctcaccggacgccaggggctcgtcgcgtggtgcgtccacgctgccggtatcggtgctgttcgccatggttcccttcgtgctgtccgcgctgctggattcggtgctggcggcatcgtcgaacagggcaggaccgtcctgctcgaagaaatcgtcctcaggtgcctcgcggcccccgggatccagatcgccatccacgaccccaagagtattagccggcactgacgttttacccaatgcgacggtgttggcgccgggcggttgccctcaggtgcccggtgtgggggcgctgcgcgcccaggcgatcacattcttctcgtactggccgtcgtgcacctcgccaccgcaggtgaccacggccagccggcgccggccggtggtgttggtgaggccgtcgggcaggccctgcttgggatgcacggtgagcccgtcgacgatccattcctgccggaccccgccatggtcggtggtgatgatgcgggcgccgggcaatatctgggacagccgccacagggcgccgggaacccgctgcatgttcacatggccggccagcagggtggttcccgccgagctggcaacgggtgcggcgatggtggagacgcccacctgctgcgggtcatcgggaacggccagcgatccgtcctcgccgagcggggccgccagcagcggggcgtcaacgcccagcgacgggatcaccaaccggtcggccgcgacctccagcgccacggccgcttccggggtcgggcgcgcggccacgaacggggccgggggaagcggcgccgattcggtgcgcggctcccccgtggccaccacggatccattcgtggcgatgcccggcgccggctccgcggccacttgcggtgcgcggtgctggaacaggatgacggccgccgcgacgagcgcgacggtcaccagcaccacccacaaccggccccaccgccacctgcgggcggccctcaggtgcggacccgtcggcatcctcatcgctgctccccctgcctgctggcgcgtcgcatccctggcgcccgtcctccgccctcgcagcgcagcactttgcatcagtgacccatggcctggcgtcagtggcccatggcctgcgtcacacggcttccgacgcaccaggcgccaccaccgacaccgccacccagcaggacgcccgccgcaatgacgagcgccgggtccagcacattgtcagacggaggccgcccggtgttgatggtggacagccccttggccaccggggccttgtcgttggtgatggtcggcaggtcaatgcggcggtgggcaccgtcgatagtcacctcaacaggctgtgacaaggggagataaccctccggggtcttggtctcgtggaggaaccaggtgccccatggcacgtcggggacggtgaatgtgccgtccgatgcggttgccacggttgtcaacgcggtgcccccggcgtccttcaccgtgaactcgacgccggccagccgctcgccggccgagccctccttcgtgccactcagtgagccgagcacaggggtgtaggcggtggagatgtcggtggacaggtgctcgttgtaggtgatctcgtcatagccgacgatctgttgcacctgctcgtcacctccgtagagatatccgatcttggcggtgcccccgtcgaagcgggcgtcgagggtgacgcccacgcggcccgccctaccggccagcttgtcggccgaggtcttgagccgcacctgtgccccgtcggcgacggcctccagcggggcgccggtggcggcgtcgaccagtgtggtgcccgccgcggtggccgcctcattccacgtgggcttcacggtgacctgcgcatttccggtctgcacgctcacggtcactgggtcggacaaccagaatccctcggggtcgagggcagaggccgggacgggctcggacaccgagatcttgtggccctcgaagaagtcgccgttcgaggcggcgtcggccctggccttcaccgcggtgatgcgtgggatcagtccgtgcggatcggcgacccgctggccgtcctgcacatcggtgaagtcggcgaaatgggggctgtcatacatgtgggccacgaattgcagcacgtagtactgctgcatggcgtccaatccggccaggtcgggattgagctcgggatgttccaactggttggccaggtaggcgagttgcggagtggcgcgccccaacggccgcagctgcgtccccgagggcgacggccggtcgaactgggcgcacaacaaggcccggccgttctcgtcgacgatgtgctccacgcgcagggcggcgtcaccggagctgtcgaccatgtaggaaacaggggtgacgtccacgctgaaggtgtggggtcccggcgatgattcccaggtgacgtcggcggcggccccggcaacgccggtgcccaccaacagcgcggtcagcgtggcagtggcggccagggctcgtgtgatcttcatggcgcatgtcctttggtcggtgccagcgctgcaccgtgcagggcgtggcattcatcgatcgtcggacatcacggggtgcgggcaacaccatgagccagtcactttccctcagacccgcactcgggtcgctctggaggctcggccgggagggcgtcagcccgcggagacctccagcgtgccgtgggctcccttctcggcgtcgctcatcacgtggttgatgaacttgtagtggccggcctcgggcgccaccatctcgacgtagccgcactcggcggggccgagcgacagcgtctgggagccgccgggccccagcgtgccgcaggccgggtcgacgccggcggccggctggtatccgcactccaggcggaatgcgccctctgcccagaccgtgtcgaactgcccgcccaccatgtggaagctgatcggctcgttggggccgatgtcgagcacccagaagcggatccggttgccgaccgtggcgggcagcgggtgcgcgtcgtactggttggcgtacccgttgaacaccacggcgtccggattgccgtcgccgatgcgggcggcgtcgttgccctccccctgggcgccgtaccagtggtcggactggatgatgaggtattccttgtccacctgcgtgaggccgggcgggtcgatgatcaccgcgccgaacatgccgttcgcgatgtgcaacgacatgggtgcggtggcgcagtggtacatccacacccccgacttggtggcggtgaagtcgtaggtgagctgctcgccgggttggatggtgcgcatcgggccgtcgggggccagcgcgccggcgtggaagtcgatgctgtgacccatcgtgccgtggttgatcagcgtgaccgcgaacttgtcgcccacatgcccgcgcagcaccgggcccggcgcctggccgttgtagacccaccgcagctggcggacgcccggcgccacctccacttccttctcggtgacgtccagggtgatgcggtgctcggtctcggggccggccggttgcagggcggcatcccagggatcggcggtcatctgcgcgttcgggtcgggcgtcgcgtgggtcgcgctcggggaacccaccgccgctgcaccgccggctggcgctgcgccgctcgcgttgatcttcatggtcatgcccatttgcttgtggccggcgatggagcaccaggcgtcggtgctggcactaatcacgcccgcgtcgagcgtgccggacgcgccgggtgacaggcgtcctgaggtggctcccgaggcaagcaccaggtcgtgcaccatgccgccggtgtcggtgttcttcacgtcgatgaacaggtgagtgccggccggcacgtcgatggtgttgggcgtgaacttcatgtcgtgggcctccaccgacacgtgctgactctgcccgttgccgaccgccccggaggaaccggcgccgctcgcagtgcccttgccgaccatcgtggccggcgagatcgcggtggcgatggccagtgcgatcaccagaacgccgacgccgagcatcgcctcgaagccgtgggtgcgcgccggtggcacgtcggccatccgcaacggcctacggatgacggcagtggccaccacgagcgtcaggaacgcggcgacgcatgccgccgccacggcgatcatcgccacccgaccggcagtcggaagcgggagtagaaaacctagtccggcgccatttgccgcgacgaggcgggtgttggacgccatgtccatcacccggttgcgccggcgcaccatggcggggccgccaccgatcaccaccggcagcaggtaggccattgacccggcgatcagttgggcggcgaaaccggcgagcagtggccaggccagcgccgtgagtcggttcatgatcgtggcggtgtcgggccccatggccgcgatcaccgtggccacgacgagcgtgcccaccagccatgccataccggcgatcacgctgcgggcagcgaagctgcgcggtggcttcacccgggcggcgcgcatcatcgcggccagggtgaagcccaggcacgccaggtatccgagcaggcctagcgccgagagccggccgcgtccgatcacgccgccgatgacgaccaccgcaagggcgatgttgagcagcggaagggcccgtcgggcatcggtctgtgcaccgggcaccatgcgggtgcgcaggatggtgggccacagggtgacgagggtgccgatgacggccagcccgagccagccgagcaccgcagaggcgatgtgggccagcaggtagcggttgaggtggcccccgccggcggtggtcatgaggaagccgaagacgccggccgccacgaaccagccggcacaggcgatgtagtagcccacgaccgtgctaccgagccgggtggtcaatgccccgcggctgcgtcgccacaggctggcgcagtggacgacgattgccacgacgacgagcgccgcgcccgccgtgacaaggggattcagggcggcctcgatgcccccgatgagcgccaggatgccgacgttgagccccgccagcacgccgatctggcgggccttcgacgaggcggctccacgcatcagggcgtcgacgaagtagtcgctccaggtgacgatggcgttggtggccacgcccagggcggcggcatgcaggccgatccagcccaggtcggcgcgccagcgctggccgatcagtgccgcgagcgcgacgagcgcccacaggcagaccggcaccgtgacggccgtgaaccagacccggcggctggccaggccgtgggggcgtctccgtgtggtggggctttcgatgttcatgcccgggagtccttggtgggggatgtgtccgaaatcgcccgcgtgtcgccggcgggtgcctgcgggtcctcagggcccttgacgacggctgcccagacggcaacggcaaccagcgacagcagggcggcgatattggccagcccgccgagggtgcgtccggtctccgatcccgccaggtcggcggcgatgcgcaccaccagcccgaggttcaacagcaccgcgacgccccagaatccggggttgaagcggaaccggatctccagcaggaacggcaggtaggtgggcacatgggccaccaccatggtcatcacgaaaccaaggaacacggcgtgcagcagggcatcgtaatgcagccctgacaaggtgggatgcaccaggagcaggccggtgacgatcaaccacaggtagctgatgaagaccatgacgccggtgaagcgctggctcggcgtgatggccgaaccggacgcagtgtccgcatccgacgcagtgtccgaaagtgacttagtgtccgaccccgcaaccgtcgcgcgggcgcgcaccctgaggtcgctgcgggcaccatcgccccatgcggccaccactgtcagggcgatgagcgccagcccgaacacgggaagcacccggcccgaccagatggtggtgaggggacacgcaaacacgatcagggcactgatcaccacgatgccgcgctgatagcgccgcgccccggccggcgtcagcaccgagggactgaaccgcgagatgacgacgcgttcggcggcaatggtgagcaccaggaaggtgaccagccaggcgaacaagtcggggatcgacaccccacccgtccacaggagcacggcacccagcgcggcgagggccccacccacctgcaccgccaccatcggctcgtgcttgcgcgtccacaacaccgaatagttgacgatcagcagcgcgcaaccgacaagcatgagcagctgaccggcctggaggggaagcggtgtgagcacgaggagggcacccacggcgagggcagccggagcgcagtaggcccacaggcgacgcagggacaccgcgctctccaggctgacgagagcttccaagaagccgatggtcatgatgatgccgtgggccgacgagaaccgctcaccactcaacggggccggcaggccgagcagcaccagggcggcgtccaaacccatcaccatggccactccgcacggcacgagcagcacgatcacgcgtcgggtctggctggcgggtttgagcggcgggtcggcgctgccctgttccgggacggcaacgggctgtgacatggggtggctttcttgcaggcgggtcatgctcagggtaggcgctgcggcgccacgcaagggccctaccccggtgattacgcggggggcgtggtgccgcggtcggtccggtgcacggagtctgggtatgcggccgccgggcacggaggggcctggagtgcagggtgggtgagttcggcgtccagcaggcattggccggccgaggcgtggggcgtgagccgtgtgacgcgccatgacccgccgagttgggcgagtagtccgtcgatgatgccggcatgtacgccgcagacgaggtcggggcactcgctggcctcgtgggcgaagggacaccggttgagtccaatgcgtacacggtcggggaggtgatcacgctgggcggctgcagggtccggcgaaacagggccggggccgattgtcgatcccactggactgtgtgtcgaggctgccgccgactcatccggaaccgctgagccgtccgggacgccagggtcacggatgcggttgggtgcgagtccccagttaccgagttgggtgaggagggcgtcgaactgcgcagtgccgtcagtcacgtgttccggtccggcgccgccgtgcgccggacttccgccgggcagcgtctcgacgtgcgacgaccaagcgcgtccggcacggcgagcccgctcccacacggtggtgggacgctgcggaccctccacggatggcggtggcgtcgcggcctcggcaaggaagtggtgcatgagcacctcggtgagcagccggggatgctgcgggccactgtcgaaggccctcgcggtggcgcgatagagcacgccgggacgtccgcgtgtggtggtgcgcgccgaaacaccgctcaccagcccggcatcacccaggtgtgccaggtggaagcgcaccgtgttgggacgcatctccgcgtcggcacccagctgcgccaccgtcatcggccccggagtggtgagcagggcgtccatcagccgctggcactgcggatcaagcggggcgccgcggtcgctgggatgagccccatccgtcgcaccgacgccgaggtctgcggcgcgacgaacggggccggtctggccgtccacggtgctcaggcggccacgcgcgtgaagcggatcttccaggcgtcggggccttcctgcacatattcgaggctgaagacatcgcgccacatggagtcgatctggtcgagcagcggcagcggattgtgcggggccaccaggatcatcgattcgttgtggcccaggccctgcagcgcgccgaggatggcggcgtggcggatcgcgtgcgggatggcgcgggcgtcgagctcgggagtgttggtatccccctccgcgcaggtgcagtggtgggtctgggtgatgggcaggtcggtcatgggattcccttcgcgcggcggccagccgcctatttattacaagttggttgtaataataactttccgacgccgggatcgccatcacgtcccgttagggctccaccgcgaaccgcgttgccgcgctgcgtcgagggagccgcacgggcgttgcatcgggtgtgtgacaagggcatcaccagcacccttgtcaagggctgtggatgctgcggcggcaggttcggggacgggctccggcttgcgcgaccgggcgtgctcccgggtaacatggcggcaaggtcctccgcgcggcggtacctcgcccaatccccccagggccggaaggcagcaagggtaagtgagctcttccgggtgcgcgggggaccccttcatgtcttcggggtcttgtgggttcggttcgtacgaatcaaggggcttgcagctcccagcccggccccgacaggccctccacataccgaccccgtcgggacggcctcctagaccagcatccggtagatcgccgtgtcgggctccaacacctcgacgttgagtggcgactcctccatgcgcgtccacaactcggcaaagttcgtggggtcgccgagctcgatgccgaccagcgccggccccgtgtcgcggttggagtgcttggtgtagtcgaagacgatgatgtcgtcgtcggggccaagcacctcgttgaggaaacggcgcagcgcaccgggctcctgggggaagttgaccaggaagtagcggcgtcgcccctcgtgcacgccggagcgttccaccacctccgcgtagcgcgagacgtcgttgttgccgccgctgacgatgatggcgatctcctggcttgggtcgatgcccagcgtggtgtccatcgggtgcacgctcagcgcggaggcggccaatgccccggcgggttcggcgatgatgccgtccacctggtacatcgacagcatctcggtgcacacctggccctcggggatcgcgatgaggtcgggggcgagttggcgggcgatcttgaaggtgaagtcgcccacgcgcgccacggcggcgccgtcgacgaagctgtcgatgtggtccaggcgaacggggcggccggcgtccatggcggcggccaggccggcggcaccggctggctccacggcgatgatgcgggtctcggggtggttctcgcgcatccacgcgccgcagccggacagtaggcctcccccgccgaccggcacgacgagcacatcgggggcgtggccgagctgctcgaccagttcgcgggcgacggtgccctggcccgacgcgatcagcgggtcgtcgaaggcgggcaccatggtggcgccggtgcggtcggcctcgtcctgcgcggcgcgcgcggcgtcgtcataggtgtcgccgcccaccacgaggcgcacatggtcgccgccgaagaagcggatgcggtcgcgcttctggcgcggggtggtggagggcacgtgcacggtgccggtgatgcccagccgtgcgcaggcccaggcaacgctctggccgtggttaccggcggaggcacagatcacgccggcgcgcttctcgtcgtcggacagcttgctgatgaaggtgtaggcgccgcgcaacttgtagctgcgcaccggttgcaggtcttcgcgcttgagccagacgcggcagcccgaggtcgacgaaatgcgttcgttgtattgcaggggggtgactctggcgacgccggcgaggccctcggcggcctggtcgacgagatgggcgagcgtggatacctcggtggtggtcacccacttattgtgcaggacgcggccgcgggggttgggctgtccatcgctggtgaacggcgcggggtggtgggcgtcgcggggaacctgttaaccttgcccgcggaggattcgcctagaggcctatggcgctcgcttggaaagcgggttgggttcacgccctcacgagttcgaatctcgtatcctccgccatcgctcgtcgatcgtcgtgtcgcgggcctgttgggtcagctggttggtgccggctggcccatttttgcgtctagggacgccgacgacgacacggacccccaatcacctgcgagacctcacacccctcggttccctactgacgtcaatacataggaatgtgaacgaagggggggatgatgtgtgtatggtgactgctgacggggaaccgtcatccagaaccagcccgtcgaacccgtcaggaccaccccaaccacagcaaccgccaagaactgtcagtggtcaccgccatactcacgatcaagaagcaccgctgcctcccacccaaccactcaaggagaacacaatgaccgatctcacctactccgacctcgaagcggcctgccacgccggcggagccagcgtcctgtcgtcggtgacggaactcgcccccgcagccggaccgcaggcaggcatcgcccccgcccgctatgtgcagggacgcgacgggacctatgcctacgagacccgcttcatcggcggcgagcccagcagcgtggtcgtcgtcgacagtaaggccagccagctcaaccgtgtggaggatgccatctccctggccatcgaggagggtgacgcctcactgtcccggatgccgtcgatccgggttgactacgaaaccctgagcgccaccgattaccagctgccccaccgcttcagcgacggccacatccgcttcggcacaatcgacggcgaggtgaccaccaagtacccggcatatgtggccgcccgcaatgcctccccggccaacgcgcgcgcactgctcgagttgagccccgtgagcttggcattcggcgcgtgggattcgacccgcaaggcgcatcaggcccgcttccgctcatgcctggtcggcgagatcatcggccagctggctgaccagaccgaggccgggcgaaagcctccgcggcgcggctctgcccgcaaggacgacatcgccccgagtgtgcagctcaacgagaaggacatgctcaccctgctcgccacgcaggaagacgagatgtcgccgaccaccgtggacaagatcacgaaggacgccaagaaggccaagaacaagccgacgtcggcttcggtcctcgggctcggagcgatccccccgagcctcgatggcctcggcttcgtctcgtgcaggcgcatcatccgctcccatgtgttgtcgttcagcgccctgcgccagctgcgtttcggcgccgacaatgcgggcaatgtcgcctgccgcgcactcctggcggccctgtcgctgcatggcctcgccctgtctgaccaggagctcgaactgcgcgccaattgcgatctggtggaagccggcgacccggtggtcacgctcgatggccgacgtggcacccacacggaactcgagccactggtgcccgaggtcaccgggcccatcctggccactgccatcgaacgcgccgtcgccacggccgggatccgctgggacgggcaggtgctcgaggtcaccggcaacccgatcatccttgccggtgccacggccgatgcggatgaggactgacatgtcgccactcactatccgagcggtatttccgctgggggtgttccagggccaccgcgccgacgggtcgcccgaccggctacccgacaccgccaggctcttctccgccctggtcaatgctgccgggcagggatccgaggccatcgcggtcaagggtcgcctcgagccgtcatcggaatcgaccgccgcgttgagctggctggagaaacacccgccgacgatgatccgcatccccaaccacgttcccgtgtcaccagaccggcgtccggatgcgtatcgaaagaccggcacggtacagggccccaagaagtcacccgcaatgcgaatcggcgcccgccagatcagcaccggaaccgccatcgacgattgcgtcggatggttctgggccgatgcaccctccgaggtgcaggagaccgtgggacggctgtgcgccgacgtctcctgcctcggcgaggatgacagcccagtgatcctcacgctggatcagttcgtgcccacccacgagttggtggcctccacccagcagctccgccccaccggactggcggtccgcacccccggcccgggccggctcgacgagctcatccgggcacatcatgaggccttcccgccgaagatgccgagtgccgcccaggattctccgagcttctccgagatgccacgcgggtcccgcgtgccgaccgaggggctgcgtgtgctgcgctacaagtcgccaacccctcctccggctgattccccgtggccccttgccatgttgttaccgttgtcggcgcacatcgcccttgaggacggcctcacgtggtgcgtcgccatgcaccggatgctgatttcccggctcggcgacggcgcaccggccatcgtcaccggccattacgccaggggcgcgtcgcagcccgcgaatcgcgtggccgtccagtacctgccgccgacgctgttgtcgcatcgtgcagaatccggagactttccccacggcgctatcgcattgttgctgccggcctcgatcgccgccgaggaccgcggtgagatcgtccgggcactcaacagcccccgattgggcctgtggtcaagcgccggccgcgtcaccctcggcaccccgctgcggatcgacgcgtcgcagttctggcccacgccccaacccgggtggcgtcgtcaatggcgcaccctggacgggatggttccggagacccggcgccaaccccgtcacgagctgctgggcgcctggggattcccccagtcggcgctgctttccgtcggccatgtgttccgcgaggaactggccctcaccagggcgaacacctactgggagaccgtctcggtcgtgactgaccgcggcgtccagatcctgggaacccatctgattcccgattctgaggtctcccgctatgtgcacaaggtgccgcgctcaatcggtgtcgtccagccctattcggcgcagctcgacctcgccgacctggtcaacgatcgtgcccttctcgctctgggacaggcacgtcaccttggtggtggcctgctcgtccccatggattcaccggaggtttcatgaccatcacgcttgatgatttcgcaacgttcttccgtgccgtcaatgcgggccacgaccccttcccgtggcagacggcgctgctgacgggtatcgctggatccgcgcggtggcccagcgccatcacggcccccaccggaagtggcaagagcgcggtcgtggaagtgcatgtcttcctgaacgccctgtacagcgccggctccgggccccgcgtgccccgccggttgtccaccgtggtcgccaggcgcgcactggtcgactcacaggccgaccgcgcgcagcgggtcgccgactggctcgacgagggcgactcccccctggctcgcgagatgagtgcgctcctccagcgcctcagcgccgccgatgacaccccgcccctggtgatcgggcacctgcgtggcggcatctcgctgcggtccacgtggatcgacgatccgtcggcctgcgcggtgatcagcgcaacgcccgacatgtggggaagccgtctgctcctgcgggggtacggctcatccatggcggctcgtccccgggaaggtggcttgctgggcctcgacaatgcggtggtgatcgacgaggcccacctgagccgccagctggtgggaaccgcacgctgggtcagccagcacaacgccgatgtcgccgagcggctgggggtgccggggctgcaggtggtggaatcgtccgccaccacgcgttccgcatcgcctgatggcatcggtatcgggccggacgacctcgccgatccgacccttcgtccgcgcctcaccctgcccaagccggtcaccgtcgtggaatcggcggcctggagtggcaagaaggccaccgaccagtacatttcaaccctggtcgaccaggtacaggacatggcacgaaccgccgacgatggcacgatcggatgcatcgtcaaccgggtggatactgcgctgcgcgtggctgagcgccttggcgacgactgcccgtgctgggtcggccccatgcgccccctggacctggcgcagctcaagcgcagttacccagcgctgttgggcctcgacaccgctcctcggcaggcaatgccgaggttcctggtggccacccagaccgtcgaggtgggggtcgacctagacctcagcggtctggtcaccgagctcgcgcccgccgacagcctcacccagcgcttcggacgtgtcaaccgccgcgggctccgggacagcggccccctgacggtggtcgccccgccgcaggacaagctcgccgagcaattgccgtattcgctcgacgaccttgccgatgctctgcagtggctcggcggcctgcctgacaccgagggcgcaagtccgcaggccgtggcagatcacccgccgaaggcgcgcaccccggaacgcgcgatcgtcaagcttccccatgtgggcgacgtgatgcgctgggacgccaccgccgacctcatgtgggccgatgaggacctggagctgtgggtgcgcgattcgttggaacccgacgatgcgcaggtgggcatcgtcgtgcgccagccgctccctgatgaggacgcggaggtcattcccctgctggcggccacccctgtggaccaggcagaggtcttcccggcgggcatcgctgtcgcaagggcagtggtggaccgcatcctcgagggccggggtgatcacgcacgcgccttcctgtcgcgtgccgacgagatcacgccgttgggtgccgacgatgcctcggccatccgtccgggcgacgtggtgatcgtggacgcaggacatgccctgacgcgtcacggcgtggtggtcagcgatgcgaatcgggccgagagcctcgagacgcggtggggaaccccggacgtggccgtcatccagaaggattcggccgattcgcagtggctttcggcgcttgcggacctgaccgcggaggacgctcagaccgaatacagcgatctcggcggcgagggcctcctcaccctgggacccccgaacgcgctcggtgaactcccctggatcgtcgtgacttcgcagaagaccgccgaggaggacgaggaacttcgccaggaatggtcggcttccgatcagccggtgctcctcaccgctcaccagtccaatgtggccggacgggctcgccgattgggtgagcgcgtcgcgctcgatccggagttgacggcggcactcgagctggcgggcgcgcaccatgacgacggcaaggccgatccacgcttccaacacttacggctgagcaactattcgtccctggtgctggccaagagcgagcatcgaagcagtcaagcggtcgtgcgccgccaattcgcggggggggagctgccccggggttggcgccatgagctgaggtccgtggcggtctcgtgggcagaggtctcgctggcgccccatggccccttggtggcacggctgatcggcacgagccatggccggggaaggatcctgccgcaacccgatgcggcgagccttgccacccccagcgatccggccgaagtgaacgagcgcgtcgcggccctgttcgggtccggcgagtggccggagcttatggccgccacgagcactacctatggcgtgtggggttgcgcctatctggaggcgctcctgcgcgccgccgactgccaggtctccaaggagggatcatgaaattcgaaatcaccggcacattggacacggcgatcacccacttcgcgctcgtcggtctcgcgaacatcctccaggaggcgggtgcccaccgggtacgactgtggtggcaggacggggcagtggctcgcccaacactgcagtgggagggccctgatgctggtgaggccgtgctggcacacgcccgacgccatgccgacccagcgtgctggctgcaggcccgacgtccggcgcccgaagacggccatgcgttgttcagtccccgactcaagccccccaccgacgacgaagggtggttcgagctcgaggaactgcgggaacacttcctggacgccgggctcacgcggctggatcagcggatgattgtcaatctcggcgagccgggatattgggtgcgccaagacggtcagccgcggcccgaccatgctgcgtcgcgctgggagatgaagacccgcaaccgcggtgaagagttcatcggacagcggttggcgcccctggcccgcgaggtgtccacctggacggcgggcaaggtgctcgatgggcttgggggccgcgcggtgaacgatgtggtgggcaagaacaagcccgattcgcgaacccctaccgggctcagctcaccgggacccacggacaatgcgttggcctggtgctccttatggggtatcagcgcgttcacgctggtgcccaagagcatcggggtgagtgccacggcgggtgcggtgccgcccgcgcgatcgtatccgcggctgctggtggtcccggtggttgccgatccgatctcgccggtgctgtggacggccctggcacgtagtcgggagctgttgtcagccttctcggatgatcccgtccggtccgtggacgccagacagctcttggtgagacgcggggtgatcggcgcgtgcagctttccactggacaagtccgacaacgacagcgcccccgaacgcacgctgctccggggcaccctgcatccctttcaggaggacgctgatgtctggtgatgacaagctgccgatcagcctggtggcccacaccgtgttctgtccgcggcgggcttggttggaggcacagggcgagcaggccgatagctatgcaatgacggccggcacgctcgcacaccggcgcgtggaccagcctgctgagtcacggcccgaggtgcggcgcgcagtgtcggtgcacagtgaatcgctgggcatcacgggccgctgtgacgtggtggaagtctcgtccgatggcctgtcggtggtcgaatacaagtccaccccggtgcgcaggaaagcagagatcacccctgcccaggccgtgcaggtcgggttgcagtccatgtgcctggaggagatgggtcatcacgtcacgagcggggtggtgcactttgtgaatcatcacaaggatgttccggttcccctgggtgctgaggcccgcgaggcgtgccgcgattgggtgacagaaacacgcaaggtggtggaggcagactctgcgcccccgccgctgctcgacgacagccgctgcaatgggtgctcacacgccacgatttgcttgcctgacgagcaggtccacaacggaggggagctcaagcgccgcatctcggtggccgatccccacggggagattctgcacgccgtcacacccggcgcgaggctatcgatgcgcgaccggcagatacgcatcacacgccagggtgagcaactcgccgccgttccactcgaacgtgtgcaggggcttgtgctccacggcaatgtggatgtttctggcgcgctcattcgggagattctgtggcgtcgattgacgatcgtctggtgcagcgggcgcggccgcgtggtgggctgggccaccggagctgcggcccccaatgggcaggcgcggatgcatcagcaggccctctcggaggtgggctgtctgccggtcgcgcgggccattgtgcgcgcgaagttgatcaaccaagcgaccctcctgcgcaggaacgccgcggcagccaccgctccccaggagatccgcgagctcagtcgggtagccatgagggtcgagagcctgcctgaactcttcgccgtcgaaggacgggcggcgaaggcgtacttttctgagttcccgttgatactcaagtcggactcggcgcaggacttcctcgacgaatggcccggccggcatggtcggggcgcgatcgacccgctcaatgctgcgctgaattacgcctatggaatgctgctcgcagactgtgttcgtgcgatcgctgcatgtggtttggacccgcatggcgggtttctgcactcgcccagccggaacaagcctgcattggccttggacctcatggaggagttccgcgcacctgtggcggattccgcggtgatcacctgcatcaataaccagacgctcaccgcggatatgttctcccacactctgggggacgtccgcctcacccgggcagggatcgccgcactcacctcggcatacgaacgccgggtgacaaccgacatcaagcatccaacgttcggctacccggccacctggcgaaggacgatggagatccaggcacgcttgttattgggattcattgacggcacgcgatctgagtatataggaatgacggtcagatgagccgacgagattcccattgctttctgatcgcctacgacgtgcccgatgaccgtcgtcgcaccaggttggccacggtactgaagggctacggggagcgtgtgcagtacagcgtattcatggttgattgtccgccgtcacacctgctggtgctacgccacgatctcaccgacgcgatggatattgatgaggactcggtggtgatctgcgacctgggcatgtccacgtcggcagacgcccaacgcatcacctggttgggcggtcagaggtaccagagcggcggacgcagcatcatcatctgacgaccagcggctctgcggcccggttgtcacgcggagccgctcgcgtgatgtttccccttgtcacaagcagattgcgctgaaggggtcatcaatcctccacgcgcgagccatccttcttcagcaccgctcgcaggcggccggtataatgcctagtgggagccctgttcccacgcccgccattgcccctccttctggaggggcccttcattgaggcgtctacaaccgggcgctcgcggagcggacccgggcctattgcccctccttctggaggggcccttcattgaggccccgccgagcgtcccgctgtgagggcaattcagctgattgcccctccttctggaggggcccttcattgaggcttcgcggagatgatcgtcatgacgcgggcgccgccaggaaattgcccctccttctggaggggcccttcattgaggctagaggggggtcaaacggccccgagtcggcatcctgagcattgcccctccttctggaggggcccttcattgaggcacgggaagtcttgccccacccctggggaagcctggggattgcccctccttctggcattgaggccttcgactggttgccgaacaggagggctgcgcacgcattgcccctccttctggaggggcccttcattgaggcaagtatttggtttctcttgctagggcccagaatattgcccctccttctggaggggcccttcattgaggcgggcatctccaccaggagcagacatggcgccggcctgccattgcccctccttctggaggggcccttcattgaggccatacatcttagccatagcggctacagacatcggattgcccctccttctggaggggcccttcattgaggcggcgatcaatcaaatgccacgacgacaatggcgaacattgcccctccttctggaggggcccttcattgaggcatagggtggcggaccctccaccctcttgcagcggctattgcccctccttctggaggggcccttcattgaggcggctccggtggcattgcgcagaatcctccgctgtgattgcccctccttctggaggggcccttcattgaggcgcgaacaccgcatagattccggtttcaggcacaatattgcccctccttctggaggggcccttcattgaggccatggcgtgaggggacgaagcggatccggtcacggtgattgcccctccttctggaggggcccttcattgaggcaatgctacggagaacagcaagaagaatgggtcgctattgcccctccttctggaggggcccttcattgaggcggacgcgggttgcacctgctggggctcccggtggagacgattgcccctccttctggaggggcccttcattgaggctcggccagagccgccgcccagctggccgccgaccagattgcccctccttctggaggggcccttcattgaggcgcgaattgtccctcacgtgctttcatccacgccacaaattgcccctccttctggaggggcccttcattgaggcggggtccagacggcaccgacgggctccacgagcaggattgcccctccttctggaggggcccttcattgaggctccaagccggcggcgagccatggttcgtgctaactgatattgcccctccttctggtgggcctaccctggtttttcggacacctgatgtggcggggcctggtggcccgagagtgtggcggatgctggtccgtagtcgaaccaggatccgccaccacctcagcgggaccacatctgaccgggctccaggggccccgaccgggcccggagtcgctacttcagctctgccgcccgttgcgaggcggtggaggccgagtcggtggggatgccgggagtcgtggggcgtgcggagcagttcacctgcgccccggggttcgtgatcgctctcgtgcagatctgcgagggcgtaccgggcggtccgtggccggatgtgggagtgatcgtttcagtagcgggcccggctgctggggtcgtgaaccgcagggagccgggacggttgccgaactggacaccgattcggtgggcatgcccatggtgtcgatggctaccgctcttttggatcccctagaagtccaaggcggagggggtttgtagaccgtacttctcacacaagaaccgggtctgacagtaacgcttggcatcagccgctacgttgcctagcactgcggagttcgttcctgctccgagaagcacgccaactactggaacagcttttccgacactctggacgccgaccttcccaccattcgttccagtgagattcatgagcttctcaagattcttgatgatctggtgatcgttgcggagtttatcggaccagtgcacgcgccctttgattgcaccggcggctttaccaacctgcgccatcggctgcgtcttggccgcttgggccatgaaagttcggttcacgagacgctggatgaacctctgctcgtccggatccttcgcgtcgaaaccgtaggagtacgccacccgggcagctatggcagtactcagcacttggatgacgatgatgtccgcactgattgaggcgacagttcctgcaatgggcaccattgcgagagcacccatggcaccaccttcgagcgcaccgaccgtgcgccacgtcaaggtactgcgatcgagcagtctgtcgcagaacttgagatcggcatcatgcagctcggtgaaggcatcgatgcacagcccctgcttttgcgcgtgggtcacgacccagctcggatcattgagatcgagggcccatgaattaaccagatcgagcaggtgaaccaccgatttagccaccggctccatgactttctctccagccgcgtcactgacgtgacggatcggctgtttcaccatctcagggatggcgccggtggccttcttggcggctccttcgacagctgcaccgccgtgctgaagcgccgcggcggctcggttcgtcagggtctggggatcactcttcttctcccagaactcgttcagcgacttccatactcgagcgtcatacttatccatcggctggccgcctgcgtcgatgtcgtgtacgggattgggcatgggtgaggatcccttcggtcggacttctctgaacatcatgcactgtctggccgacagatcgagttggggtatgtcgttggggtatgtcgagtgccctgaactcgtccgaggctcagaagccctggtgatcggtgtcagtgcgccaggtaacggggaagccggcgccggtctcatgggatcccgccttctcgagttccgagttgccggcatccttcccacccgcgacgagtccgagcaactgggcagggccaccaggccccgccacatcaggtgtccgaaaaaccagggtaggcccactggaggggcccttcattgaggcttatggatgatgacgtcagcaatgatgagcaagaattgcccctccttctggaggggcccttcattgaggccttcaccacccgcgacgaggccatcaccgctgagctcattgcccctccttctggaggggcccttcattgaggctccttgcactccacgacgagcctcccccgcatatgaattgcccctccttctggaggggcccttcattgaggcgcgttcgcgaaggcgatcgtctccagcagcccttgattgcccctccttctggaggggcccttcattgaggcttggggtgaggtgggtggccagatccttgccgggaattgcccctccttctggaggggcccttcattgaggcgcggccgcgattgcgttgagctcgctgacgaacgtattgcccctccttctggaggggcccttcattgaggcgcttccgttggtgaacaccattttggtttgattccactcattgcccctccttctggaggggaccttcattgaggctcgtcgtgggcgccgggcacgtccatctatctggcaaaattgcccctccttctggaggggcccttcattgaggcatgtcggcgcgcttcggcctggtgctgcctctgcgggtgattgcccctccttctggaggggcccttcattgaggctcggcatgatgccagcgccgattatcgtgagcgtattattgcccctccttctggaggggcccttcattgaggcaagatgagcgggccgaggggttcgacccgggacgcggattgcccctccttctggaggggcccttcattgaggcgtgagctcgggctgagcgtgagccagacagcggcaaagattgctcctccttctggaggggcccttcattgaggcgcatttgcttgcccatttgcttcctccaatctgcgtattccccctccttctggaggggcccttcattgaggccgcaccaaggccccggctcggcgagggacggttgccgtattgcctctccttctggagaggcccttcattgaggcttgcgccagctctcggagacgatggcgccttgacgtggcgttgcccctctccccgggcgaagccctccacccgttcaacgtcccgaaactcacggaactcccgccggcgccgagagctagactcgccatgagaaggtgggaggtagggcagacgcccagctgacccaccttccctttttcgcacccccggtggcgccaagagccaccgattccgtccaaccccccaccctctcgtccacccgcgcgaggacccgtcaccccgatcagcgctcactgacaaggccacgtggccgcgcacgagccctaggcgtttccggacctgacagccgccatgacaaggcgttttcgtcacgcactggcgatgccgagacgtgcccccacacagctccccccgctacggttaaatccggcggggccggcaaggcatgcccccttcattgaggctgacgccaatagatgggcatttgcgacacccgccaaagtccctcctcacggaggggcccttcattgcccctgcgcccagcaaacccgtcatgggtaggctgggccaccactcacaaaccccctcatgcgggggcgccaacggcaggagaccacgcacatgatcgagaacccgggccagaccaacaatcaaccccagagcgacgacactgaacgtcccgaggtgcgcctggtgcccgtgcagctcgagatcaatggcagctacgccctgcagctggaggacgacaagaagttccaccccgtcgcccaggacatcgtcggcctgtgtgaactgttggtgcgtcgctccgaggacctgggcgcgccgctgctcccctcgatcgaccagagcgattcggccaatgaggtggcactggccaatgccgcgccgttcccgatcatctccgaccgctacggcacgctcgaggtgcccgtcgacatggccggcttcctcaagagcatggacgagtccaccccgtacaccggcgagctgctgggcaccgatctcatgcacatcggccagatgatgaaggaactgagcatcaagaccggaatccagtgggtcccgatgcccgtcggtaaggccgagaacggcgaacttggcacgatgaccatcgacgagcagtaggaatcaccgcggggccgtcgcctccggggacgggtcagccgcgcaacaggaacttgctgaatgcgccgcgtcccgacccggaatccgagctccacacctgcccgtccaccaggatctggcagctcacctcggcgtcagcgtcgcctcccgacaggctcttgaccttcaggaagacgccgtcgaggttcttcacgcgcgcctcgtgtgaccagctctgcgacatatcggcgcgcgtgccgtcaccgtcggtgacgcggtagaccacgaagccgggacgattcgtcgtcgcccggaactcaacaacgtgctcggagtcgagcttctcctcctccaccatcgccgcacggctggcgaccgccccactcgacatggtcgacacggcagccggcgccaccggcgagggattcgtgtcgggcgtggacgcattgcgggtggtcaccacgatggcgccggcgatgagcaccaccagcacgacgccgatcgcgatcagcacggtgcgcagggtcaccttcgggcggggatcatgtgacggacggggggtgtcggacacgggggtgtctcctgttcggcgatcagttcacggcaggtgtggccggttggcgctgggtgggcggcgcgtcatgacaacgcgtccaagcaacatagcggcacgcccgcccggcctcgacaccgcctcggacttgcgcccggacgccaccgccggcgcaccgctgcggaaccttacccggattggcctactgctgccgccgatacgatggccacggccgaggcgcccaccgcgtaggcacccaccgatcgaccggccaggtgctccacggcccgcgggttcgccaacacccggggcagggtgacgagcggcgggatgatgctgggcggatcatgcaacaccggcgtgagcacctcgacgcttccgcgaagcgggccgcgtcgcgcgaccgcgcgaaggagcgccccaccgatgccgcgccgtgtaccgggaggctccgccgcacccaggccgatcgccatcgtggaacgcgtccgcacaccggcccgggcaaccactggttggtgcgacaacgtggccccggtggcgagatcaacgagcagctgtggcaggttcactcccgcagctgcagcgttgccgggctccaccgtgcgcggattgcattcgatgaactgtggttgcccctgcgatgagaagaagtccaggtcgatgccaccgtgccagtcgaggtgctcgcccacgcggcggatcgcatcgacggccaccgggtcgccgacgctgagtcgggccgcggcgctgccaccaactccggtggcgagctgttcgctgaccgcggcggctaccaggcgcccatggtcgaagatcgcctgcacctgccggtagcgtcccggcgcggactgctgcaccatcaccgggttgtccggtgagcgcagggcgtgccatgcggaaacggcctctcgatggttgtgcacgtgacgcacgccgcggcccgccgtcgagaacgcggccttgacccacaccggaaagccgagccgatccaggtcagactcctgctgcacctcggcccaggccggctgtggcagggcgaggtggtcgagcagccgcgcaaagcgcaccttggactccagctgtccgaaggccccgatgtcggcgaccgcgacgcgtgcgtggggcaacagccgacgcccggcggcgaacagccaggcctgctcgtgggtgggaatcaacgccgtgaagcgtccggtggacatcaacgcatcgacgcccgccagatagccgatcgggtcggtggcgggcgccggcgcgtggtgcagcctgcggcaccagcggctgaaccgggcgatcggcgccgatgaggcactgacgatctccacctgcaccccgcggcgccccagcaccgtgagcgtctccctggccgtcaggctcgagccctctgacaacaacacccgttcgccgtgcatcacgcgtcccttccaggttcacggtaggcgcccgggcgatggccgggacgcccgtgtcagctgcgggcgggccaccacgatcttgcccagggcgtgcccgctctcgaccacccggtgcgcctcgcggagttgggtggcatcaaagggctgcagggcacgggtaagggtggtgcgcacgcggccggtatccaccagttcggcgatgcgttccaggatttcgtgctggcggatcaggtccggagcgtggaacatggagcgggcgaacatgaattcccaatgccacgtgagcgccttgttcttcagggcgtagtaatcaagttctggttcgtcgtcaatggcgacgatctgcccgaaggggcgcaataccttgatgaagaaggggatctggcctcgactatgcgcgctgaagacatcatcgacaccgcccggcgccaattccacgatctggtcggcaaagtcatcgtcatggtagttgagcacgtggtcggcacccaggtcgacggcccactgcgtggagtcctcgcgtgatgcggccgcaatcaccgtgacgtgggtgagctgcttggcgagctggatgagcaccgagccgacgcctcccgacgatccgagcacgagcaatgtcccggagctgtcggcggtgaggcgcagcttgtcgaacagggcctcgtaggcggtcaggctggtgaggggaagcgcagcggccgcggcgaagtcgagggtgtggggcttgtgccccacaatgcgttcgtcgacgagctgcagttccgcatcggagcccgcgcgggtgaggtcaccggcgtagaacacctcgtcgccgggcgcgaagagcgtcacctcaggtccgacggcctgcacgacgccggcggcgtcccagcccaggaccttcccgtcgctgggcttgccgcccgaacgcaccttggtatccaccgggttcaccgatgtggcgtggacctccaccagcaggtcgtgcccctcgggggccgccggggcgtcgacggtggcgtccacaaggctgttcggcccgtcgagcgggcccccgtcgcgggtgacgactgcgtgcatcgtgcgtgccatgagtgctcctgttccggggcgcacccaatcgcgcccctacaaggaccaacccatgggaccgggctattccggggagcggtcgggacgcgcccacgcgatccctcggccggctcagatgttgtcgatgtactcgcgggtgaggcgggcggcgtcgtcgatggacaggtcgccctgggccagttgttcgcgcagcgcctcgaggtgtccccgcgatggcgaggtgcgggtcgcaggcggggtggcgctgaggcggtgcttcacggcaggtgcgatgggtacgagttcggtcgaggtgatcttctcgtgggcccgacctgtcgttgtcggttcggtatccggtgtggtgctcatcatggcgcctccttcgcatccatttgtggaacgtcgaatggggcggatctgttcccacgacattttgccttggacgccgaggttttgtgcgctcagctgcaggtgccgagttgattggtgatggcggccttctccgcctgggtcacccacagggaatacttcgctttcacctgcacctggtgggtcacataggtgcaacggaatgccttgttcggtggcagccaggtggcggcgtccccatcgctcttctgctggttggtgggtccgtcgacggccagcaggttgagcgggtcgttggcgagctgggtgcgcaggtcggcgctgagttgctgggcgcccttctgccacgcgtcggacagggcgacgacgtggtcgatctgtacggcggtggaggtgttctggccgcgtgtgaagtggatggtggtgcccgtgtaggggtcgtgcagcacgccgctggcgaccacgcagtcgtgggtgccgggcttgtagaccttgtcggtgaggtcgcgggccaggatgtcgttgcgggtgtcgcagccgttgtggtcgacgtccttccacgcggtaccgaactcgctgcgctcataccccgtcttgggggcacggcccttcaccggcaaggtgttgagcagctggcgcacggcctccgcgtcgccggtggccaccgcctcgcctgccgcactggtctgggtgatggatggcgtgggcgtgcttgttgcgacggaggacgacgccgacgtcgagggcgagcctgtggtcgcgggcgggtcgcaacccaccagcacgctggcggcaacgaatgccgccagcgcgagccagccggctgatctgtggtgcgccatggatgttcccccttgtcggtgatgactctagtgagggggtgtgacacgaatgggacgaggggcgacctcccggagctccggcaatcgctgcccgcaccctgcgccagatcaccgaagacgaactacccagcgacgtcaggagctggtattaataccgtcgcggggctgtccgacagaagtaactagcccatactgagcggtatggcgtcaacgagggatcattcaaggcattgaaggccaagcgctaccttcccgaaggctggactgacgaattgatcgagggccatcatgttcgcccttcggcagcagggaccggaggctctcggggactcctgttttggaaactgccagattcggtcaaagctgttgaagatgccacttaccgatgctggcaagccgtggcgagagtggcctcaatgccattgccaccgtcacgccatgaagggggtcgatctcgatggatcagccacgggtgccgctgaccacttcctatgagatgctcgaagtcctgacgacgaagtttggcgccctccttgatggttatgaggctcagggggtgagggccttcgagaaggcaggagagccttacgacgccttgggcctcctcctgtcagacctccatttcaagggcgtgaagatccccaaggagtatgcggacaagatctggtcgatcaccgatcctgaagatgttgaggattttgcgatgtatctcggtccgcgccctaaggcgtagttgtagttgttcacgcggtggcagacgcgggcaggacaggaagccacagcgggcctcttgacgggactggctcgttgacaagggtgctgaagagggggcccggggcgagcgaccagccctcctgacggccggatcacttcaaaggaccgggacacccgggccgtggagtgcagctgtgcgggccccgccccacagagcggaaacgtggcgatcaccatccaggaggtcgtcccacaggcccggccgcgcactcggtaaccaccgccctgaggggacacataacgttgatcatcgactttctcaatttcaaatcaatacggccacggtcagcgtaatctcagaatcgatccaacggaccctccgcgatcagatcatccccctccggaagaagccatcatgatctgggtgcatctgctgattctgctcatcttcgtcttcctcggctcacggcttggaggcgtcggcatcggcctggcgggcggtgccggagtgctggtcctggtggccacagggctccataccgacgccgccaaggacgtcccgtggtcggttatcggcatcatcattccggtgatctgcaccattgccgcactacaggtggccggcggcatggactacctggtgcacctcaccgaggtgctgcttcgtcggcatccgaagcagatcacctatctggctcctttcgtcacattcatgctgtccctgctgtgcggcaccggacatacggcctattcggtgattccagtgatcgtcgacgtggccaaggagcacgatgtgcgaccctcgcgtcccttgtcgatcgccgtggtcgcctcccaggtcgcggtggcctcatcgcccatctcggccgccacagtggcaatgaccaccgtggtggaaccgatgggaatcggctatctgcaggtgttggccgtgacgatccccaccaccttcatcgggtgtgccgtcggcgccatcgtcgcatcgcgtcagggcaaggagctcaaggacgatccgatctaccaggaacgtgaggcaaagggccttgtgagccacagcgccgctgccgcagcgcctgacttcaagccggccccgagcgccatccccagcctgctcatcttccttgcctcgctggtggtcatcgtggtctgggccaccatcagttccaagcagctcggcatcatgagcaacccgcccatcaattcttcgtcggccatcatggtgatcatgatgaccaccgccgccatcatttgcgtcttgtcacgcaagccggtgtccgaggtcacgacacagtccactttccgcgctggcatgactgccgccatctgcatcatgggcgtggcctggctcggcaccaccttcttcaacaattacatgtcccagatcacgacagttggttccagcctgctgcaccaggtgccgtggctctatgcagtgatcctctacttctgcgcacccctgttgttctcccatgcggccacgaccgcggcattcatgccggttgccgccaagatcggcctgactgccacgacgatgctcgcctgctatccggcggtcgccaactactatctgctgccgaattaccccacgacggtcgcggcgatcgaaatggacgacaccggatcgacccgggtgggacgctttgtgctgaatcacccgttcgtgattccggggacggtgtcgattgccgtcgccgtggccctcggcttcttctgggcgccgatcgtcgcctgacacgcgggcgactaccgcgacttcaacgcttcccgcgcgttggccgcccacacagccgccccctagagcacaacacacgggaagatgcgcctgccttttctgacggtccgatattccaggggtgcgggcatctacccgccccctggaatagccctcggcaattcgcaccaacgctcccctacccacgcatatcggactggccaccgcactcgcccgaacccgttaccctggccgggtggcagacgatcccaacaacgacatggctccgggcctctacgagaccccgctcaccgaggaactccaggcgcgcgtcgaacgcacggggttggaggccaccagcaagcccattcccgccgaacggcgcgatgcggcgctgtcgggctcggtgcagcggaccctgcgcgagcatctgagcgctctgccggaggcgccccgcaaggcggtgtacacaaccaacgagattcttcggcagatcgccggccccagcgcccagctggtcactgactcccgcggcgatccgttggagctccagtcgctcaccgacggccgtccgcgctatgccacgcgtccgctgacgccgctcaacgagtcgacgctgatcaccaacgcacgccgtgacgagtccctggcacaggcgctcaacctggagctggccacggctgaccgcgtcgacctgctgtgcgccttcgtcaagtggtcgggcatccaatcgatcatggacacgctggccatgctgcacgagcagggcgtgccagtccgcctgctcaccaccacttacatgggcgccacggacgccacggcgatccaccggctggccgatgagctcggtttccaggtgaaggtgaactacaacaccggaaccacgcgcctgcacgcgaaatcatggatgatctaccgcaattccggattccataccgctttcatcggcagctcgaatctgtcgcacgccgcaatggttgacggcctggaatggaatgtcagggtctcggcggtcaacgagccggcattgttctcaaagctcgggacagcctttgacacctattgggacgatccgaaattcgagccctaccttcccgaccgcgacgacgagcggttggccaccagcctcaagcaggccgttgcccaaccgggccggcactttgatgccgcgttcctcgacatccagccgcagccccaccagaggatcatgctcgacgacctcgcccacgagcgccagcaggacttccaccgcaacctggtggtcgccgccaccggcacgggcaagacggtgctggccgcgctggactacctgcggctatgtggcgacaagcccggctcgctctcgttgctgttcgtggcccaccgcaaggaaatcctggagcaggcccgcagtacctacgcccacgtgctcaacgacgccaacttcggcgaactcctggtcggcggcgaacacccgaccgagcatcgccacgtcttcgcgtccgtgcaatccctgagccgcatgaacctcgacgcgcttgatcccacagccttcgacgtcatggtgatcgacgagttccaccacgccgaggcggcaacatatcgccgcatccttgaccatttccagccccgggaactcctgggtctgacggcaacccccgaacgcgctgacggcgtcaatgtcgcctccttcttcggtgatcggatcgcctcggaattgcgcctgtgggacgccctcgacggcgacctgctggcgccattccattacttcgtgcagtgggacgacaccgacctgcgcggcgtcaaggccagcggcggcgaataccaggccggtgagttgtcacggctctacacggacaatgacggccgctcccggctcgtgctggcggcgatgcgccaccgcatcctggatcccacgcgcatgaaggcgctcgccttctgcgtgagcgtggagcacgcgcactacatggcggatgtgttgagccaggccggcgtgccatcggttgcattgtcggggcagtcgtctcgggaaatccgcgaggcggccatccgcgatctgcgggagggcaggctggcctgcttgtgcaccgtggacctgttcaacgagggcatcgacatcccgtcgatcgacacggtgatcatgctgcgtccgacccaatcggccacgattttcctgcaacagctgggacgcggtctgcgtcgggcaccgggaaagtcggtgctcaccgtgttggacttcgtgggacaccagcgcgaggacttcagcttcgaaccccgcctgcgggccttgaccggccagggacgcaagcagctggtcgactctgtggagaaggggttcagcgagctgccggcgggctgcgagatccagttcgacaagatgtcgcagaaggaagtcctgaagaatgtgaagaggcagctggccaccaccacgctgcgcctggtgaatgagttcgcggactacgcccgccgctccgccagcccgacggagtattcgctgcgtcggttccttgccgagtccggactgaccctcggatccatctttggccggtccaagttccgcggcgagccggtggagatgaccttcatccggcatcgggcggggctggcagcgacgatcgatgtcagtcccaccgggacctatctgcgtggtcgggtgcgcaatttcgcccatgtcgacgatccggcgcgcgcccaggcatatgtcgccctgagctcacctcagggcccgcaatgggacgacctggggcccatgcagcgcatcgccgcggagatgctgttctattcggtgtggcccaagggccgcgatcaggacgaccagctcattggcagcatccgcgacggcctcgacgtgttgcgggctcatggctggttctccgacgagctgcgggaagtcatggaatcctcggtcgacgcatcccgcgccgtgttcgaaaggcccggcggaaaccttgccggcaccccgttggtggtgcacggcacctaccgacgcgaagagttgctggcggcaatcggcgtgggccgggccgatggtgacgcgcggatgcccggggacgtccgtgagggggtcgtctgggtcgagtcgaccggaatcggcgcattgagcgtgcagttggagaaggactcggactccttcaccgacaccaccatgtacgcggactacgcaatcaacgacacgctgttccactggcaatcgcaatcggcaaccaccccgggcagttcaagcggccgacgcctgctgggcgagcatgcccagagctttgaccttgcactgttcgtgcgccaacgcggcaatgacgacctcggcaagggagcgccgtacaccttcctgggcctggttgatctggtgagttacagcggctccaagccgatcagcatcacatggcgccttcgccggcccatgccccatggcctgtacctggcagcgcgggccgccgcgacctgatcaggggaggttgcgatcggccgcgtcaccggaacggagctgagcacaccatgccgtggcctcgggacgcaggtcagggtcgaaggcaggatcgtccagcaggaccccagtcgcctccagaaggggttccggaatcctgacttcgtccagcaaagcgaattggaggccgaggtagatcgcaaactccggatcccccgcctccagcggactccacaagataaagcgaccagcctctgagagcaggggcaacagatcccgtcggagggcatcggcaataccgtctacatcaagcatcttcatcccttcaggtctcgcacgcacctactgtggtcgggcacgcgcacggttctccgccaatcacttccgtgactcgggcagcatgcccggagtgaagcccgggtcggtcaggtcaatctcgatcgcatccaggatgtccttcgggatgactacctcgtcgatcaacgcgtattgcagcgccaactagaccaggaagtctggatcgtcatcgtcgtgcgccgccctcatgattgtgcgcgacagagagctcaagtacggctccacacggcgcgtgatggcgtcatcgagatcgttcacatcaagcacgtcgcgctcctccttcccgcgcggctgcccctgaccaacgtctttgctcgaccccggcactgactcatcgccacacatgcgagcaccgtgcctggccacacttcgcgcatcgcagtgacgctgcttcgcgcctgcgctggggagacgcactccgggatgctggcgccacgccgtcgttcagcatggcctccgtacccatcgcctgatcaagcgccgcatccctctcgagctgggcgaggatcgcgtccagatcatccggggaggcaagcgcttcgttgatccgctgctgctccaataagcgaagctccgcaagcctcaatgcctgttggtattcgtattcggcatcagcgcgcgcctccaatttatcctcacgcgcctgaatcctcgccttcttggccctctcctccttcgcgttttgatgaatgtctaccagcacccacagaatgagtccacccacaactaggaaagagacaatagttcccatcaccccaacctcctatcaagtacgggctccaaggccttcgagctcctttggggtatcagcctcccccacttgttcacaccaccagcaatgtgtgtggcatggactatccggcacccgaccgctccagatgatccaacgactccactttgttcatggcctcagtgaagcaggccccactgacagtttctggccaccaaggtccccggtgggtcgaaatcgcccgacgacaggagcgccgggaggttggggtcgcccgcttgcccggcacctgcgcccaccacaggcgcaagaactgtcagtggccacccctagcgtcgtggcacacgacacccggagccacgccagccattcggaatgacgcccgacccgggacgcttttgaaaggcaccacgatggacaagatgagagtcctcacactcctgaccatggcctttgccactttcacgatgtggttgccaaacggctattggtgggcgcgagccctggtcaccacaagcctggtggtgagtgtcattatcgacatcatccacgtacaacgcctccgcaaggagcgacgcgagagctcctgacttgcttccaataagagaatcccttgtcagcaccagttgcaaggccgccgaatcaacgcgtacggaggaaaactcgtgaagcccccactgacctatgtgattattctgacaacacttgtcatagcctgggtcgcgcccacaccctggtggtttcggacattcacgacgctcagcgccactatcgttgtggtgtcgattgtcatcgaccttgtcgcccgagcggaggaaggccatggacgtcgccctggggatcgcagggaccctgatgatcctgttggcccttgaccgggccctgcgctggatggagcggcgcggctggatctactaccggaagcgcaagcggacggcaggcgtcgctctggggcccctattcgaggccctgcatccctctcaccagtacgtcgccacagaacaacaacggcagtcgacggtccgcaaggattccgaggacggccaagatcgatcgccccgggaggaccaaccgaccgtaggcccggacgcccagattgcccgccacacccaccgggctgagccgccctcagcgtgacacgctgccgcactcaggcggccgaatcgacacgtcccgcaacgcgacctgcgcccgcctgacgctgatctccttcacgatgcagtccgtggactgcgccgggcacatgccgaaaactgtcagtggccgcccgtactgtccgagaacaccgggttgaagcacacgcagccgcagatcatcttggtcacggccccgcagaccttctccaccatcgacgaaagggacaagcatgaccagggagaccacagcacaggtcgccatgcacaccatgggcgccgcgagcacggtctacgtatgggcagcccgcggccccaagtgggcacgcatcaccaccaccgcctgcacgctcacggtggtcgcgcttgacgcgtacctgctcgggcggtggctgcgcactcgctgagccgcgcctgccaaccccggacggaggcagccaccggcgctcagtaggtcgccaactcctcgatggaggacgcaatcacgatgtgcgcgccgggatgcacctcatgcagcagcgaggccatcgccgactgcggcaaggccacgctggctgctcccgccgcaccgttggacacgtgcacgaacgatgcggaccccgccccgggcgcgcgctcggcattctggccgatcaccaatccgtaccggtactgctccgagaaatcggccatgcgcaggttcggcacatcgcaggcgtctcgctcggcataggagttgtagtccgggtcgcccggatcggacacccagcatgagcctgcgttgagctgcgtatagggcagcagcgtgccgggatcggcgcccgtgccgaacgcgggacccagcggccatgatcccgcgggtgtcaccgacgaaccctcgtgcgcccggccgacgccgccggcaccgacgaacccgctctgggcccactcgtcatcccacgaacctgctgcacgacggttgaggaggtgcacctgcgccgacgatccggaagccacgaccgcaaccacctgatcggtgagcgccccggtgggcgacgccgccaccgcagcggggatcgtggtgatcccggtctgcgccggagcgtccgtcgtcccggacccgggctgggacgacgcggtggcctccggttgctgcgccgcggcaccgcgcgccctggagggctccccggccggcgcggacgcggcagggcttgaaaccgcaggagtcgagccgcccggcgaggcctgaccagcagattgttccgctccgccgaccccggaggccgacacgtccacggacgcggacaggctgggcctggcgacggcgtccaggcgtgccgcgcgggcggccgaacctgccacggcactgccggcgaccagcgcgaccgcgcagccaacaatggcgactggtatgcgtttcatggctttcctgggtcgacagcagatatcggtggggccggggccccacacgggacgtgctttcatcggacgctaacccgcacccacggcgcgattcaaatcacgcccgcccaccaacgcggaatatccgcgtcaatacgcctgaatatccggcgtggctgcgtcgattctcagggtgcacacagcgcactcgcaggcacgccaccggcgccggccgcgtcccgaaggccaacgaacgggcacaccgccgaccccgtcgtcggccttcacccaccaccacggcgcggcagggcagtccacgggagaacctcccccggaattgtcagccccctgcggtagatttcctaacacccggaccccccaatatcctcgggaaaggatcgtcatgatctcgttggtcgtgctcattgtcgtcatactggttgtcatagcgctcgcattcgccacgatcttcgtggtcccgcagcaatcgggctatgtgatcgagcggctgggcaagttccaccgcgtctcattggccggcctgcacgtgaagatcccggtggtcgatcgggtcgcccagaagatgaacctgcgggtggcccagatggacgtgcagctggagaccaagaccctcgacaatgtgttcgtcgtgatcgttgcgtccacccagttccgcgtcgaccccaacaacatctccaccgcgttctacgaactgcaggacccggccggccagctcaaggcctatatggaggacgcgctgcgctcggcaatcccctcgctcaccctggacgacgccttcgcccgcaaggacaacatcgccctggacgtgcagcagaccgtcggcaatgagatggcccgcttcggcttcaacgtggtgaagacgctgatcaccgccatcgacccgtcgaaggtggtcaaggaggcgatggattccatcaacgccgcccagcgcgagaaggaggccacccgccagcgtgccgacgcccagcgcatcgccatcgagacgcaggccaccgcgaatgccgagaaggtgcggttgcagggcgagggccaggccaactaccggcgcgagatcgccaacggcatcggcgaccagatcaagagcctgcactcggtgggcatggacatcgaggaggtgaaccgcatcgtcatgttcaaccagtacctcgacgtgatgcggtcgctgtcggagtcgggcaacgccaagacggtcgtgcttccggccagcacgccgggcgcgttcaaccagctctacaacgaggtgaccaacgcgctggtcaccgcccagcagacggaggcccccaccgtgatcgcgggggacgaggcgtcactggcgacccacgcgcagcacgacgccccctcgcgcagcacgcagccggaggactagacgactcccgccgcaccagcggcgatccggcgacgtgagccaggtccccgtgggtcagaagaccgaagggtcaaagggccacaaggccaggggtccggagctcagcgccagcgtcgcggcaggcccgagcgacaccagcacccttgcccggcccgcgccctgacgaatcagagcagcgggaccagcacggcggagggccagcaggcggcaggaccagccggtgcctcaggcctggacgtcgtcctgcggagccgccggcggacgcagcaggcccagcgtcgtgagccggtcggccatgaaggcgtccgagacggcgtacgaaacggccacggcgtgcacggcatcggccggggtatccatctcggggaaggtcgcattccactggtccagcagcgtcccggccggcaccagcagctcgccgatgaaggcgcggctccaggcgatctgctcgtcgctgaccggcagtgacaggcgctgctcgatcgtcttcgtctgatcgtcgggcatcagcagcagcgcggccagcgcgccaccgatcttgggcgtctggtcgcgatggggctcgtgggccgacacgaagatcgccacggcattgggattgttgtcggccacgccgatctggggcgactggtcggcggtcagatcctcgcgggcgaacacctcgatacccagggggccggccaccttctcgaggtcaaccggcaggttgagcgtgccgtcggggtcgacgacggatgccgccaacagctggttggcgtaggcaatggggtcattcagcacaggagatcctcacgtgggcggaagttccgtcgattgtcgcacgtcggccagtccgatgccgattacgccccggaacccacaggccccatcgccggtggtccgagctgcattgacgccctcaacaccggcgtgcgcggcggacccgacccggcatcagtcacactcgaggcattcggccgcgacatccccgaggcctgacgacatcggaccgacgtcggcgggcaggtcctccccatctgtcgtcggattggcggccacttgtcccctaagtggacacctgtgcggcacatgacaccgcataagtgcccactgagcggggttttggggtgcgggcgtcgtcctatcgggtcggttcgtcactaagtggatggttgtggtgattagacgcatcgaaaccatccacttaaggcccgattccgccgtcggggccggccgacgatcaccgtgcggccggaaccgacccggcaggggcgcccccgactagtggtgatgcatacccggctcgtgctgggcatgcgccccgggctcgagctggaaggtcgagtgctcgatgccgaagtgcgtgcgcaggcagtcctgcagttcgtcgagcaattcgggcatgtcaccgtcgatgaagcagtcgtcgcgggtgaccacatgggccgacacggcgggcaggccatcggtgagcgtccacacgtgcaggtcgtgcacatcgatcacgtggtcgaggtccatcaagtgcttgcgtacctcgtcgaggtcgatgtcgggtggcgccgcctcgagcagaatgctgcccgactccttcaccagcggccagccggcccgcagcatgagcgccaccaccaccagcgaggcgagtgcatcggcgcgcgtccacccggtgaacaggatcaccagaccagccaccagcgtgccgatgaagccgaacaggtcggtgaggatgtgctgataggcgccgcgtacgttcaggctcgtgcggttggccctggccagcagccaggtggccaggaagttcaccgcaatgcccaccagcgccaccacgatcaccggcggggcatgtacctgcggcggggtgatcaggcgccgcacggcctccacggccagcacgagtcccaacaccaacagggtgacgccgttggcgagcgccgccaggatctcggcccgcttgaagccataggtccaccgtccccgcgccgggcgcgccgcgagcgtcatcgcccacagcgccacgccgatcgacgccacgtcggacagcatgtgacccgcgtcggacagcagcgccagcgaaccggtgatgaaggccaccaccacctcgccgagcatgaacagggccagcgcgatgagggcaccccacaggtagcgacgatctgcgttggcactcaccccatgggaatggctgtgctgctcatcggcaccatcggacaccttcgcgtgatccgccacgcctcactccttgctacgccgcggacgcgctgcgacgccgttctcgttgtgatcccttgtcgtatccactgtgccacccgctctgtgccacccgcgccgcccggcgtcccgcgcgatcattcggcggaaatatggcgcaccccgtggcgccgggtgagcaaccagtcgaagaaccacaacacggccagccagacggccccgacaatcaacgaaatacggtaatttggcatgaatcccatgagcaccaccaccatggccaggaaggcgatcaccacatagctggtaactggatggccgggcatcctgaaggcgagtttccgcacgccctcgggcccgatgcgcttacggaacttgatgtcggtgatcacgatcatcgtccaattgatgatgccggcaatcagggcgatcgaaatcacatagaggaataccgtgtcggggaacagataggtgagcaccaccgcaatggcggtgacgcacgacgacaccagcacgcccacatagggcgagccgaagcggttcaccctgcccagcacggcaggggcgttgcgctgcctggccaggctgtagagcatgcgtccgttggagtacaggcccgagttgtaggccgagatcgcggcggtgagcaccacgatgttgaggatcgtcgccgccgagccgatgccgatcttgtggaagatcaccacgaaggggctctcggaggtgcccagctcgttccacgggaacaggcacagcatcacgaacaccgcacccacgtagaagatgaggatgcggtagaccacctgcgtgatggccttggggatggtcttcttggggtcgtcggtctcgccggccgcgatgccgatcagttcgacgccgccgaagctgaacatcaccaccaccaggcccatgagcattccggtgacgcccatcgggaagaagccgccgttcttccacagattggagaatccgatcggatggccgccattgccgaagccggtgaggatgatcaccaggcccaacacgatcatggcgataatggccaccaccttgacgatggcgaaccagaattcgctttccccgtaggccttcacgctgatcaggttgatcgccgtgattgccaccaggcagaccgcggcggtaacccattgcggaacgccgggtaaccagaattggatgtactttcccaccacggtgagttcggccatggaaacggcaatgtaattgaaccagtagttccaccccgaaatgaatccggcgcgtgggctccagttcttgtacgcatagaagctgaaggcacccgaggtgggcgtgtcgacgctcatctcaccgagcgcgcgcatcaccaggaagatgatggcgccgcccacgatgtagcacagcaggatcgccgggccggcctggccgatcgactccgcggagccgtagaacaggcccgtgccgatggccccgcccagggcgatcatctggatgtggcggtttcgcaggctcctgcgcagtccggcgggggccggatcggccgctgtggtgctcatgcgtgacgccctgacggacagttgtgcttcactgcttctcctctggccccattgacagcggaacgaacgggctcttcactgcattggtgcgtcaaaacttgtgcggcaatcgggtgctgcgtgggtgtggggatcgtgcgctggcgccgaactccacgggcaacgctcccacgtgccgccggggcattcaacatccccgcaaacattgccaacgagcgcccgccgacgaggccgaacggctcccccaccagaccctgcgtggcatcgccggcgcctgcttgcccggcactgcccggggcgacggcgcccggggctacactcgccggtgaaacgcgggagctcaccgagtgtgtgggctgagaggacgccatccgggcgtcgaccgccgaacctgtccgggtaatgccggcgaaggaagcgagcgtcaatgaccgacgtccatatggcccacggaaccaccgggaccatcgatacggccaccaccgagcaggcggtcgacctggcgggcgcgctgcgcgcggtgcgtgacaacaatccgctggtgcagtgcctgaccaacatcgtggtggcgaacttcaccgccaatgtgttgttgtcggccggagccagcccggcgatggtggacaactcccatgaggccgccgacttcgcggccatcgccggcggcgtgctcatcaacaccggcaccccctatcccgagaccgccaaggcgatgctgctggccgccgaatcggccgcgacgcaccacaacccgtgggtgctcgacccggtggccgccggcctgccctggcgcaccgacgtggcacgcaatgccctggcggccggcgatccggccatcatccgcggcaatgcctcggagatcatcgcgctggccggctcgtcgtcgggcggacgcggcaccgattccaccgatccggtgactgccgccctggccaccgccaagcagctggcgcgcacctatcactgtgccgtggcgatcagcggcccggtggaccacatcaccgacggcgagcgcgtgctcaccgtgtcgaacggccacgagtggatgaccagggtgaccggcgtcggttgttccctcggcgcgctgatggccgccttcgccgccgtcgtgccgaacccggtggacgccgccacggccgccaccgccctgctgtgcgtcgccgccgaccatgccgccgccgagagccgcgcccccggctcgttcgccacggcgctggtggaccagctctacctcgtcagccccgagcagctcgccgccgaagccgacgtgcgcgccctggccgcgtgaggccggccatgctacgaagcgaggaccgtccgatgccccgatccgatgcccagcccgacgcgcagttcgacaggcagcccggagccggccgacgtcgcagcgttgacctgtccgtctacctggtcaccgacaccgaacagtgcggcggcgtcgacggcgtggtgcgcaccgtgcgcgaggccgtcccggccggcgtgacgctcgtgcagctgcgcgaccatcacctgtccgacgacgatttcgtcgccctgggccggcgcctggtcgacgtgctggacggcaccggcgtgccgctgctgatcgacgaccgggtgcacctggtgggccccatcggcgcgcagggtgcccatgtgggccaggacgacatgcccattgaccgggcgcgggccatgctcggccccgacgcggtcctggggttgtccacccagacccccggccatgtggccgccgcccgcgccatgggcgagcagctggtggactacctcggcgtcggcgcgctgcactccaccggcaccaagcccgaggccggcgacctggggatggccaccgtggcgtcggtggtggaggtgagtccctggcccgtctgcgcgatcggcggggtcaaggccgacgacgccgcgccgctggccgccatcggttgcgacggcatgagcgtggtcagcgccatctgcggacagccggacatcgcggccgcgacccgccgcctggtggacgcctggtcacgggccaccggcgtccccgcggcccacaccggccacacggcgggcaaccctgtaggccaggcaagccccgcaagccaggacccctctgcaagcccgaacccctcacccgacaaggcggcccgatgatgtccactccccctgccccggacaccaccgcaccgtccggagccacggcggccaccaggccccctgttgccctgacgatcgccgggtcggattcgtcgggcggcgccggcatccaggccgacctgaagagcttctcggcgctgggcgcctacggcatgagcgtgatcgtggccctcacagcccagaacaccaccggcgtcacgggcgtgctcgcgacgcctcccgagttcgtcaccgcccagctcgacgcggtgaccagcgacatccgcctcgacgcggtgaaggtgggcatgctcgcgtcggccgaactggccaccacggtgcgcgacgggctggccgccctgcgcgccgccacgcccgatctgcccatcgtggtcgatccggtgatggtggccacctcgggcgcgcacctgttgcccgacgatgccgtggaggcgttgcgcggggtgctgcgtcatgccagcctcatcacgccgaacctgcccgaggccgcggtgctgctcgacgagccccaggccaacggcgtcgacgagatgatcggccaggccacccgcctgctcgagctgggacccgagcgggtgctggtgaagggcggccacggccacggcgccgaatcggtggacgtgctggccagcgccgacgacgtgcaggtactgcacgccccgcgcatcgacacggtcaatacgcatggcaccggctgctcgctcagctccgcgatcgccgccctgcgtccccagcgcgacagctgggacgcggcggtgcgcgacgcgaaggactggctcagcggagccatcgcccatgccgacgccctcgacatcggcgcaggcggcggacccgtgcaccacttctaccgctggtggtgaaccaccttgtcagacgcatattcgtcgctgtccacgcctgccggacaccgctcgtccagcactgagtcgcgccggtcggtggaggccccgctgacgctcaccgacaagccgccgcggaccctgggagccggtgcccagacggccatgtgggcgtcgttcggcgtcaccctgttcggcccgctcaccggcgcgctggtcacccaatcggtgggttcgctggtcggcgggctggcggcgtgcgcgctcggcacgctggtcggtgccctgttgctcggtggcgcggccggcatcggcgcccacaccggcacgccgtcgatggtcgggttgcgcggcctgttgggccggggcgcgtcggtggtgcccacggtgctcaacatcgcgcagaacatcggctgggcgatgatggagatcatcgtgatcaccagcgccgccacgcacatcgtcggcgccgcctggcactggccgttcgtgatcgtggccggcgcgctgtgcacgctcatggcgatccgtccgctgggcagcgtgaagatcctgcgcaccgtgatgctgtggctggtgctcgccgggtcgatctacctgttcgtgatggtgctgcgccagccgagccacaccatcgggcaggacaccgtgatcggcttctggcccggcgtcgacctggcggcggcccaggtggtctccttcgccccgctcgcggcggactattcgcgtcacgccacctcgggacgctccgcgttcgccagctcggcgaccggctacggcctggcaatcttcgcctattacgcactcggggtgttcgcggtggcgcaccttggcggcgacctggccggaaccaacctgctggcggcgctcatggtgctcccggtgggtggcctggcgatcggactgttgctgctcgacgagctcgacaacgccttcgccaatgtctattcgtcgacggtgtcggtgcacaacctggcgccacgcctggatcgacgcgtcatctcggtggcggtcggcgtggtggccaccgtgctggctgggctggccgggttcgaccagtacgagggattcctctacctgatcggttcggcattcgtgccgttgttcaccgtggcggtggtcgacttcttcgtcacccggcgcggacgctgggacaccacggccgccgcgccgttcaggtggtcaccgaccctggcctggttcatcggcttcgtggcctatcagctgatctatccggggtcgatcccgggctggtccgacctgtgggccgggctggcgcaggcgctcgggttcgtggcacccggctggctcggttcgacgctgggttcgatcgtggtgtcggccgttgccgcagccggcctgggcgcgatcgatacggccgtgcgccgacgtcgggccgaggaacgtctggcctagtgggggcctcgttggccggggcggggcgcacagttcctgagcctgccccgtcacccggacgcgtccccctgccccatcgtccggacgcagaagcgtccaccccgcccatcgctcagacgcggaagcgcctgaacaggcccccgaacaccgcgtaggccagcggcaccagtgagacgcccatcatgatcaggccccacatcgggtcgttgccgcgcagcaggatgccgccgagcaacagccccacgaacagcacggcggcgaccacgcgtcgcacgcccacctcgatatggctgagctggcgttcgatctcggggatctcgacgctcaactggccgcgttccaccatggtgagcacgcgggtcaggcgtcggggcaggcccagggtgatctcgagcagcgccctgccctcgtcgaggatcatcttcgcctgcgaacccgggtcgccggtgacgagctggtcggcgtagggctgcaccgaatcccacaggttgtagtcgggatcgagcgcggtgcacagcccgttcatgagcgacgcggcgcggatgagcaacaggaagtcctcgggcagctggaagggcatctcgcgcatcaggtcgcggaactggcgtccgaagtcgatgaactccttcgggtcgagttcgcgcatctcggccaggctcatgccgccgaagcggtcgaacagctggcccacggcgcgctccagcagcgaccgatcggccgagggcagcagcatgtgcagctcttccatgcaccgcaccaggcgttggctgtcgcgcaggccgatggcgatgatcacgtccttgagctggccgcgcaggtcgccgggcacctcgcccatcatcccgaagtcgatgaaggtcagcttccagcgcctgcccacctcgccgaccatcgcgtcgggcaccggggtgacgaacagattgcccgggtgcgggtctgcgtggaagaagccgtcctcgaacacctgcttgatataggcgtcggccaccgcataggccacctcgtgcgggtcgatgccgtgctggttcagggcctcgatgtcgtcgaccttgatggcgctcacatccgacagcgtgagcacgcgccggatggtgcgttcccacaccaccgcgggcgccgaaatcgtcggatcgtcggcgaagttggcggcgaagcgctccgcgttggaggcctcgtgcaggtagtcgatctcctcggcgctggagcgggcgaattcctcgacgatgccgtgcatgtcggtgcgctgcgagatcgccttgaggtgcgacgcccagccggccaccctgcgcagggcggtgaggtcgatgtcgatcacctgctcgatgccgggacgctgcaccttgaccatcacattgcggaacccgacgtcgcgtgcctcggacggcgagagccgcgcgcggtgcacctggcccagcgacgcggcggccaccggggtggactcgaaggattcgaaggcagccgacagcggcatgcccagctcggcctcggccatgggccggatctgcgagaacggcacctcgggggcctcgtcctgcaggccggcgagttcctcggtgacctcgggtggcagcacgtccaggcgggtggacatgaactgcccgagcttgatcatcagcccgcccagctcggccgccagcgtgtggaagcgtgccgccgccttctggaaccgccgggtgcgtccgcgcgcggcaagccgacgcaggcccacgcgcggcagcaccacgtcgaagaaccacatctgcacggtcagccgggcgaagaacccaaggattcgccgatagcgtgcccgcagtggtcgatcactgctcattggaggcctccccggtcacccgcgccgcgaaggcgacctgcttcagtcttgcgcaagaatcgaatagaccttgcggcgagcctcatcgatcacctcggtgacggccttggtggtggacgcattgccggtggtgaccacctggcccactgcctgcaccaggcgcgccgtggcccgcggaagcaccatcgactcgggcaggtcattgtcggccgccgactcccacggcttgggcttgtcgctggccgcctcggcctcgctgcggccggtctcggtgaggctgtagaccttcttgccgtcctgttcctcgagcgagacgagtccctcgtcggccagcatctgcagcgtcgggtacaccgagccggcgctgggcttccaggcgcctgcgctgcgcttgtcgatctcgtggatgatctggtagccgtgcatgggctcctcggacagcagcgccagtacggccgcccgcacgtcgccgcgcgcggcacggctctgggtgcgcgcctgcacgaagtcgcggaactgcttctcgatctggtcgaacggcgccgtgaggccaccgtcaaagccgttgtcgcgacgcccacggccgccgggtcccctaccgaatgctccgtacatgtcagtcctttcgtcgtggtggcaagccgtggacgatatgtccgtggcttgctcagcgatacccaacgatacatcgctcacgagtggactccagagccttgggacggtgattctgagcgacctccaagccggtggacgagggcccgggaaagggtgctggggtccccgatcggctacccctgacgtcgattcctgcaccgtgtggcccatggtgcaggattccgtcacacaatcacttcggatcgcccacagcgcaatcacagcgcgtggcgagaattcatagtttgcgaaaggatgacaaaacagagccgttcactgttcgcctttggcgggctacccatttggcggctctccaccccatcgaaagtgagtgacgagtacatgtcacggattaagttcccaaggctgagtcgcatggccatcgcagcggcagcttccgctgccctgatcggcaccagcttcatcgccccggccacggccttcgccgcgccgggcaccccgactgccgtcgcggctgccgccgcaaacggcacagtggccagcaatgacgctgccgccgaggcgtccagcctggtgatcaacgactctgacttcgcccagggcgcgtacacagacgcccacagcaacgacaagatccagctctactcgcagatcgccgcctacaccaccgccgatggcaccggcaccccggcgatgtcgaacgccgcggggaagaaactggtcttgccaaagagtctcggccactcgatcgtcgatgccgatcaggtcaagtcgatgtaccaggtgatgaccatcaagaacacctcggatgccgacttcaaggtcgacgagcagatgacgctcccgaggttctatatcggctatgacaatgactccaagtcagtggatgtcgacccgagcgcgttcaagggtagtgagctggacccggacctgatcacaggcaagctgacggactagtcgatcacctaccggtacaagtccctcgacggaaccgctgacgcgacaaaggcgcccacgtccctcgagaaggtggaactccggggaacgctcgccccaaatgccagcatcacgatcagagtgccactgacgctgccgacgcttcaggacccggctaccgggctggtattcagcatcggcgcggcgtcctacggcatctcggtcaacgcggtccccgagacttcgatccgtttcgcgagcccgctgaaggctggcgacaccagccttgtgccctacaccggtgccttcctggccaccgtgaagtcgaaggacggcagcaagtacacgaccgttccctcactgcagcagtacatgcccaaggccgagaatggcgtgaactactgggtgaacaacttcagggtggccgccgcgtcgggggcttccgatgggctgctgtacctgaagggctactacacggttcccacggcgcccctcgcggcggccgtcaaggagcacggctatgacaccgagttcagcggtgccgatcggatgacgcagtacatctaccaagccagcaccacgtcggccaacgtcgtcgactccgatggcaacccggtgaaggtcaatcccgatcgcacggccccctacgtgggactgcgccaggtgatcgacggccatgatgccgaggtcgccgtgggcgggaagttcgatcccgtggggaacctcggcctggtggtcaacgaccatgccggcaaccccatcaccttgcccagcgacgatgtgaagatcgacatctcgaaggtgaacactggcgcgaacggcacctacccggtgaccgtcacctacgcccctgacgaggtgagcaacaccttcaacgtgaaggtcggcaccggcaccaccggcggtggcggcggcgagaccggcaacacggtcacccccaaggcacccacccagggcgccgaccaggtcaccatccccaccatccccggcgttgactaccaggtcgacggcaagaccgtcaccggcaccatcaccctgaacgatgggcagaagatcaccgtcaccgccaaggcacaggacggctacaccctcaccgagggtgcgaccgccacctgggacttcacctacaacaagggcaccacacccacctgcgatacccagtacttcaccgatgtcaccccgaacatgcagttcttcaacgacatctgctggctcaaggcgaacaacatcaccaccggatggcccgacggaacctaccgccccgtcaccccgatcaaccgtgacgcgatgatcgcctacatctaccggatggcaggcagcccggcgttcacaccgaccacccagacgttctccgatgttgcaccgaacaaccagttcttcaaggagatcgagtgggccgcttcccagggcatcaccaccggatggcccgacggaaccttccgtcccgtcaccccggttgcccgcgacgcgatggccgcattcctctaccgccagtcgggcagccctgcggtcgccctgccggcaaacccctccttcaatgatgttgccgccaacaacatgtactacaaggagatccagtggatgcaggccaagggcattgccaacggctggtcggacggcacctaccgtccgctcaacgacaccaaccgtgacgccatggccgccttcatccaccgcgccgtcaccagcggagtgctgaccctgaagtaacaagtccgggtggttcccttcgaaccccacccacaaccagcagtgatgccgtgcgagctccccgctcgcacggcatcactgtgtttatgggcgcctgcccgggctcacggccgcctgccaacctcggagaagcaccgacggcggccaccggtaccgcagaaacacgacgtccggccctctacggcgcgaagatatttagtaacaccatgatttatgcccaagatttgcggttctgtgggataattcgaaatatcggagctactccccctcacgccgacgtgcgctcaggtggctccgcgcccacccccacaaagaaatgacgagtttcatgccacggattcaattcccccggctcagtcggatcgccatcgctgcggccgcctcagctgccatgatcagcacggccttcatcgctcccgccagcgccttcgccgcgccccaggtcgcaccggcagccgcggtggccccggccggccaggcagacgcggccgccacgcagcccgaggccccggtggtctacaacgggctctcaccgcagaccgatccctggcaggacaaccagccgggcggcaccattgaccaccgcacggtgctgcgcgtcaacggcaccgacgtcaccaaccgggccggcaccaaggcatcctccgacatcgaccccaccggcatccgggccgtgtcaaccattgacccgaccgcaaccaggacgttcgagctcgtgaccaccctcacgaacaacacaacgagtccgttcgtcctcaatcgcggaatgctgctgccctgggcgtacagctcgggattcggcagtgcctattccccggccgctgacgcaagcggttttgatgaggccaccggcctcaaactgtcaccgagtgcgggcgctcccgctgacctttccttccgctacggcgtgaagaaccagccgcgccagagctggtccgactacagggccgccggccacactgccgccgagctggccgagatctatctcaccggcaccctcgctgctggtgccacgatgacgctcaccgtgccgttgaccgtgccgggcgactcggtggcaaccaacagcttcacctacgcggactcggtgggagccacgcccgtgacgtcctatgcgcgcttcaccgtgcccgagaaggaccccaacggcaagaacctgattccctacaccggcaggtacctggccacggtggccgacaaggacgccgacggcaagccggtgctggccgatgggaagccggtgcagaaggccctgcccgattcctccaggccctgatgcccgcggccgacaacggcgtcaactactgggtgagcaatgtggcccagccggcgctcaagagccccaccagcgaaaccgtgctgtaccccgccagcgcacaacaggcgggtggcttcaccacgattgatgccgccccgatcgccgacgcggtgaaggccctcggctacgccgccaacgccgatgccaagggcgcctacaaccgtcaggtgggggtcaacgcacccacgctcgtcaatgccgatggcagcgcccaccaggcgagcgccgataacaccgcgccctgggtgggactgcgccaggtgatctctggcaatgacgtcacgatcccggtcggcaccggcttcgacccggtggcgaaccctgacatggcgctcaaggtatttgaccagaacggcgcgctggtcgacctgttcgacaagagcctggtcaccttctcgcccgagacgatcaacaccaccacgccgggcacccaccagatgaccgtcggctacacgccggacggcgtcacgaggaccttcaccatcaccgtggctcccaaggacgtcatcacggtgaaacccgaaccgcctcatctccgcgatggcaggtgggtggtgatccctgagatggagggcgtcgaataccaggtggatggcgagaccgtcaccggcgagatccacctcaccacactgggcgagctggtggaggtcacggccgtggcgaagcccggttaccagttggaccccactacgggcccaacctggggcttcacctggggcctgcccgcaacgcccgagaagccaacccagtcgggcaacacggtgacgattcccgacaccaccggcgtcgactaccaggtggacggcaagacggtgaccggcgagttgacgctcaccaaggacatcacggtgaccgccgtgcccaagtccgactactacttcaccgaggacccgccgagctgggacttcacattccaggcctctgacaaggtcgtgacggcaacggcgcccacccagaaggacaacgtcgtgacgatcccgacagtgaacggcgtcgactacctggtggacgacaaggtggtcaccgagcccatcacgctgaccgacggccagaaggtcaccgtgacggcacgcgcccaggagggtttcgtgctcgatgcgacgaccaccccgacctggaccttcgaatacaaggacagcggcgaccagaccaccacagtgaccccgaaggcgcccacccagggcgctgacgaggtgacgatcccgacggtgaccggcgtcgactacctggtggacggcaaggtggtcaccggcacgctgaccatccccgacggcaccaccatcgtggtgacggcccgggcgcaggacggctatgtgatcaccgagggcgccaccacccggtggaccttcacctacaacaaggacgtcccgccggtctgcgatacgcagtacttcaccgacgtgacgccgaatatgcagttcttcaacgacatctgctggctcaaggaatccgggatcaccaccggttggcccgacggcacctaccgcccggtgacgccgatcaatcgcgacgcgatgatcgcctacatctaccggatggcaggatcgccggcgttcaccccgacgaagcagacgttcagcgatgtcgcgccgagcaccatgtactaccgcgagatcgagtgggccgcccacgagggcatcaccaccggttggcccgacggaaccttccgtcccgtcaccccggtcgcccgtgacgcgatggcagcgttcctctaccgccagtccggttcacctgcggtgacgctgccagccagcccgtcgttctccgacgtgccggcgggcaacatgtactaccgcgagatcgagtggatgcagcatgagggcattgccaacggctggctcgatggcaccttccgtccgttgaacgacaccaaccgtgacgcgatggccgccttcctgcaccgtgccgtggaatcgggggtcctcaccctggcgtaacagtcccgggaccctccgggccgggtggaccaacccctccggatggggtgggtcaacacaacattgatcaccaccgtggtgacccacccggggtggatcaacacaaggccgaaccacccgtgatgacaggccaatgccgtgcgagcgacgttatcgtccgcacggcattgccatgtccggggcaccacgcgtccgcgccgaccggtgcaccgaatatcttgctgacgcgtcaagaaccgcgccgcatcgatgccgccgtgatcaacgcgggtaaccgggttccgcccggaacggggttaccaccgtgcatactcatccacggcctgcccccaccacacccccttcccaggagtcctccgaaggagatgaatgtcaagcgcccatcaacgcacgccccgccgcactctcaccgcaatcctcaccaccgccgtgctgctgaccatggcacccgccacagcgcagtccgcacacgcacagggcaccgtcccggcaatcccgccgacaagcgacgaggtgctcatctacaaccatccgggctatttgttcgacagcacgcgcgtcagcgacaaggccaccaagcccctcacccgcctggtgggatggcaggcctccaccgccgacggcaccaccgagaccaccgagcgcgggtcgtacggcctggagtcgctctcggtgatcaacctgaaccgggccaccagcctcaggctcatcacgtccctcaccaacgacaccgacgcaccggtgcccatgaacaaccggctgctgcttccccggggcacccgggtgctggaccacatgcccggtcccgacctgcccgcaccctccgctgggacgccggtgcccacgatcgaggccaccgccttcgacgaccagggcctgaaggccgaattcctcaccgcgcccgagcggtggggcgagctgcgctatgccgccggctgctcgcagggcccggtgacctgggccgagttcatcaagacctgcacgccggccgacctggagcgcatcgacctcaacggcacgctggaagcgcatcaggcgctcgggttcaacctgcccatgaccatgcccgacgacaatccgggcacctccttccgggcagccctccgcccggcggacaagacgcccccacagcccgtcgaatggcgtgagaccgacgtctcggcggtgaccacgttcgaccgtccgttgcgcgatgtggacgggcaactgctcgccacgctccgcggcccgttcctgcccgccgtgcgcggcgtcggcgcagacggctccgagacgtggaccgtgctgacgccggtgctgccctatctgttcaaggccgacggtgactacacgatccgcaactttgacatcttcggccagcgggacggcgagacgatgctgttcgagcacagccgcatccaggtgttgacgcgcttcaccgccaacgcggtggcccagctcggatatgtgatcccgtccgtgcccactgacgaggggccctactaccagttcttcatcgacgactacacggccgagacgatgcgccgccggctgttcaaccccgatggcacgccgttccaccgcgacgccgagcacacggcgccggtgattgaggtgcgcaaggcgatccagctcaatcagcaggtgacgatctcgacgagtgagcacttcgatccccgcaccgacccgcgcgtcaacctgcgcatcaccgacaccgagggccgggctgtggacccgatgggcgacaccgtcgaattcaccagcgactactacaaccccaaggtgccgggcacctatcagctcctcgtgtggtggaagcacaacaagctgcccatcaaggtgcgcgagggcctgctggtgaccgtgcaggaccccgtcgcggagccggagcagtcccccgaggatgccaccgtggacgagccgaccccggaccagcccgaccaggaccagcagcccgttcaggcagccgtggatgcgccggctgacgacccgaccggcgacgcatccaccccggatgccgatgacgacgcggccgccggcgacccggcggacactgcagcgggtactgcgcccgtggacgccggtcctgcggatgccggacctgccgccggggccggacagcccggtggcggcggagcacccgccgatagtggacccccgtcggcaggtgacgccgccgagcccgcgctcgaggttcccctcgtgccgaacatgctcgtgcccttcctggtggacgtgcacaccaaggagttcctgcccgacttgtgcgccgggcaattcaccgatgtgacgccgaccatgcagttcgcagaggacatctgctggctcaaggaatccggcatcaccaccggctggcccgacggaacctaccgtcccgtcaccgccattaatcgtgacgcgatgatcgcctacatctaccggatggccggatcgccggcgttcaccccgacgaagcagaccttctccgatgttgccccctcgaccatgtactacaaggagatcgagtgggcagcccaccagggcatcaccaccggttggcccgacggaagcttccgtcccgtcaccccggtcgcccgcgatgccatggccgtattcctctaccgccagtccggtagccccgcagtgaccctgccggcaagcccgtcattccacgacgtacccgccgacaacatgtactaccgcgagatcgaatggatggcctccaccggcatctccaccggatggcccgacagcacctacggccccctggccgacaccaaccgtgacgccatggcagccttcatccaccgcgccgtcatcaagggcgtcctgactgtgaagtagcctcacgctccgatgggcacgggagactctcccaaccaaagcccacaaaccgaaggggcgggcggacgacaccagtcgtccgcccgccccttcaaccatcaagagcgaccaataaagccccttgtcagcgacgcatcaccttgcgcgccaaccggttaccggtgaactgcgcgatctgcaccaacacgatgatcgtgaccaccgccaggcccgtcacgccccagttgaagcgctgatagccgtagctgatcgcgaactggcccaggccgccaccggcgaccgcaccggccacggcggtcatgtccaccacggccacgaacacgaaggtgtagcccaggatcagcggcccgagggcctccgggatcaccacggtgaacaggatgcgccaggggccggcacccatggaacgggccgcctcgatcacgccgggatcgacggtcaccaggttctgctccacgatgcgtgagatgccgaaggtggccgccacgcacagggcgaaggttgccgcagtggtgccgatcgtggtgcccatgaccagcagcgtcaacgggccgatggccgtgacgaagatgatgaacggaatgggtcgcacgatattgaccaccacgttcagcacggtgtgcagcccggagttcgacatcaccccaccgcgacgggtggagtacaggcccaggccgagcagcaggccggcgaaaccgccgatgaccagcgtgatcaccaccatgatcagggtctcgacgattgccttgccgtagacggggccgatggtgtcccagttcatgcccgcacccccaatccgtttgtggcgatcccgttgtcgcgggcgccgtcgctctgcccggccgcgtcgtcctggccggccgcgcgggccggcgacaccgtctcaccggtcatcaaccccgccgagccgggcgcgctgttcaccagctgcgccggctcatcggtggcctcgcgtggtggcggcgccggggcctcatcggacttctggtgcgagatcgccaacagcttgtcgctggcgcgcgagatcgcatcggggctaccccgcaatgccagggtgaagctgccgatggagcgcgtcttcacctgcaccacgccgccctgcacgatggcgaagctgaccttgtggtcgtcgctggcgtcgtcgctgatctgcgccagcaccgcgccgaattcgcccgggtccaccgacttgacgctcaccagcgtggcatcgggattctccgcacgcaggcggtcccattcctcggtgctgggattgtggcgcatgatcgtgttgacgaaccgcttggtggtctcggtggccggggtctcgaagatctggcccaccggcccctgttcgatcaggtcgccgttgtcgagcacggccacgcgatcggcgatcgcgcgcaccacctccatctcgtgggtgatcaccacgatggtgacgccgagcttctcgttgacgcgccgcagcaggccgagcacgtcctgggtggtttcgggatccagggcgctggttgactcgtcggcaagcagcaccgacggcttggtggccagcgcccgggcaatgcccacgcgctgcttctggccgccggacagctcgtcggggtgcacccaggccttctcggtgagccccacgaagtgcagcagttcggtgatgccggccttcatgtcggccttgctccacttggccaggcgcagcggataggcgatgttctcgtacaccgtcttcgactgcatcaggttgaactgctggaagatcatgccgatctccggacgcaccttgcgcaactggtgctcggtcatgttcgtcacgtcgaagccattgacctcgacgctgcccgaggtcaccttctcaagcccattgatgagccgcaccagagtgctcttgcccgcgcccgagtaaccgatgaccgcaaagatctcgccgggcttcacgtccaggttgattcccttcagggccgttaccgaccccgacgcggtctggtagaccttcgagacatcgcggaacgatatctggctggtcagggtgtggtcacccggtcgcggatcgctctgggtcacttcttctccttgatctgggtctccaacttgtcgaggatcgcctgcaggtcggcctgcgacttgttctcgacgatcaccgcggtgccattggagccagaaaccaccaggtcagcaaccgccttctcatggtagagctcgacgacgcgcttgtaggtggggttgttcaggtcgtccttgcgcacggcgaagacgttgatgtacggctcggcggccgcgctgttcgggtcgtccttgtacagcgccttggacggatccagcttggcatcggcggcgaacgagttgttgacgatggagccgtcgacgctgggcagggaggctgcggtctgggcggcgtccacgggggtgaccttcaccttggagttggcctggtcgatgtcggcgggggtcgacagtgcggtgccgccgccgttcagcttcaacaggccggctgcctgcagcacgagcagggcgcgggcctcattggtgggatcgttcgggatggcgatctcgccgccctggggaatctggtcaaccgaggtgtgcttcttcgagtacaggccgagcgggacgatcatggagccgcccagcggcacgatgttgtcgttgttctgcacgttgtagttggccaggtagagcaggtgctggaactggttcaggtcgagctgcttctggcgcagcgccgggttcacctcggtgtaggaggcgaagttcttcgtctgcaccgtgatgttctccttggccgcgagctccttcagcttggcccagtagggctgcgactcgtcggtgacgccgatggtcaccgtggtggtggctgccgccttgggcttgcgggtggtgaagaacaccaccaggcccacgatgatggccagcacgatcacgacgatgccgatgatcaggcccttgctggggccactgtgtggcttctcgggcagcgcgccgggggttccgccgctgggattggcgggattcgtgggattgctcatggctcatcatccttgctgtgggcttgtggtgggttgtgcagtgctgggacgtgcagtggtggctcggcgctggccaccgactcgacggcggggccacatgggcacgagcgattttgaggggagcgccttgtcacggacacgggtcctgtggcgagaaggcctgtcccgcatggatgcggtcgcccgggggcgagtcgaacaggtctgctcagcaggcgcagagcattcgcccacaacacagcatgggcatcatcacgagggggctcgtcacgagctggtccggcgacagggcggcaccgcgagtggcggtggtcgtgtcgacagtcatcatcatcctcatggcagtggggcaggtgccccgattgcccacaaatctaggcgcgacccgcgagcactgtcaacgacgtccgctctgcgggcaacgtctcccccgcgggcagcaggtgcaccggcggcgcgtccgcaggcgacacacccgggcatatccgcccacagtgaacgcacaggctttctacagtgaagcctgtgtgctcgctgtcaggatggacgcatggctggacctaatgcacccgaactgctcacccgccccgacggcacgcccatccgcgtgctggcggtcgacgatgagaacagtctgactgaactcctgtcgatggcgatgcgctacgagggctgggaacccacgacggcggccaccggctccgatgcggtgcgtgcggcgcgcgacaccaatcccgacgccatcgtgctcgacatgatgctgcccgacttcgacggcctcgaggtgatgcgccgggtgcgcgccgaacagcccgacgtgccggtgatcttcctcaccgccaaggacgcggtgaatgatcgcatcgtcggcctgaccgccggcggcgacgactatgtgaccaagccgttcagcgtggaggagctgatggcccggctgcgcagcctgttgcgccgcagcggagccaccagcaagcgctccgagtccgagctgatcgtcggtgacctggtgctcgacgaggactcccacgaggtgacgcgtggtggcgacgagatccacctcaccgccaccgagttcgagctgctgcgctatctgatgcgcaacccgaagcgcgtgctgtccaaggcccagatcctcgatcgcgtgtggaactacgacttcggcggccaggccaacgtggtggagctctacatcagctacctgcgcaagaagatcgacgccggacgcgaaccgatgatccacaccatgcgcggtgccggatatgtcctcaagccggcctgagcagcccggcggcagcgtccagcatccgaacgagcagcccggcgctgcccaccccggggcgatccgggacgaggcagcccattccgggacgaccaactccgcgacgacccagtccggtccgggtttcgtggcgccctccggcgatgcctcgatgtcgtcgaatgcgaacgcgtcgttcccccgccagccggacgccaccgcaaccggcgccagcggcgctgcccctgtcagtggtgccaccggcaccgtgccggtcagtcccggcaccgtgcccaccgcggccggccaggaactgctgacccagaccaccaatggcatggcccgggccaggaaggccccggccatggccaagggcacgctgagccgccagctcgtggcccgtatctcggcgctggtcgccgcgatcgcgatattgctgggcgtgctgagcaccttcgtcgtctaccagatcctcgtcaacgaggttgaccacgaactgtcgcagtcggtcggcgccgagagccggaactcgtcacccaccggcagcgccatctcgctcggcggcctgcccgccgacgcggtggtggtgatccagcagggcgacggcaccaccgtcggcagcgtcgagacctacgaccgcacccagaccgtgcgcacctcctcgggagtcaatgacgccatcgcgaaggtgccggtcgatccgcgcgcccacaccgtgcggctggcggagctcggctcctaccgggtggtcgccagcaatgtgcgcatcggcgtgcccaacgacgacggctccgagtccaccgtctcggccaagctgttcgtcggcgtgccgatggagcggtcgaacagcgtgatccaccgcctggtgatcttcgaggcgatcctcgccgccctggccatcggcaccgccgcgatcatcgcgcgcagcgtggtgcgtcgctcgctcgaccccctcaaccacctggccaccaccgccgatgaggtctcccgcatggacctggagaagggcgaggtgaacctgccgccccgcatccccaactccgagaccgatccgaagaacgaggtgggacgcgtcggcctgtcgttcaaccggatgctcgacaacgtcgagggtgccctgacggcgcgcgaggcgtcggagaacaaggtgaagcagttcgtggccgatgcgagccatgagttgcgcaatccgttggcgtcgatccgtggctatgcggagctcgcccagcgacgcgccaacgagctcgatcccgacaccgccttcgcgatgagccgcatcaccagcgagtcggagcggatgagcgggctggtggaggacatgctgctgctggcccggctggacaccaagcccgagctgcagctggccgagaccgacgtggtggaggtggtgctcaatgccgcctctgacgcccaggtggccggccccgaccaccactggcgcctcaacctgcccgacgaggcggtcaccgtgatggccgaccgcaatcagctgcaccaggtggtggccaacctgctgtcgaacgcccgcaagcacacccccgcgggcacccaggtggacacctcggtgggcatcgagggcgatcaggccgtgatccgggtgcacgacaacgggcccggagtgccgcccgagatcgccgacaaggtgttcgagcgcttcgcgcgcgccgacgtggcccgcacccacgacaaggagggttccacggggctcggcctggccatcgtcgcggccgtcatggccgcccacggtggcactgctgcgctggattcctccgacggccacacgacgttcacgctgcgcctgccgctggcgtcggacgattcgggtcggccggcggggccgccgccgcaggcggacttgtcgcactgagccgggtcgtactgggccttggtcgcactgggcctggtcacaccgggccttgccgtactgccccgggccagccgggcacggtgagccgggcgcgacagcccggcctccgacaagcgcccggtggtcaggcgcgacagcccggtggccggcaagcgcccagtagtcaggcgtgatggcccggtgtcccagctggatacccggctccgcgcggacccactccggcccgacccgccgtcaccagcgggccaggaactcctgcagctccggctggcccgggtaggaggcctgggcaccgcgtcgggtgacggccacggccgcgaacgccgacgccagggccgcgccctcacccagcggcacctcggcggcgatcgccgccatgagggtgcccatgaaggcgtcaccggcaccggtggtgtcgatggcctgcacggggaaggcaggcacgctcaccaccagtccggcctccacggccaccgaaccctgcgcccccagcgtgacgacggcccggccgatgccatggccgtccagcgctgccgcgatatcggccggctcccggcccggatcggagccgaccaccgccgcgagctcgtgttcgttgacgatgagcacctgggcgtccgcgacgagttcggcgctcacctcgcgcagcggtgacacattgagcacggtggtgccgcccgccgagttcaccagcctctgcgcggccaacagcgccgggtcagacacttccaggcacagtcccagcacgctgaccgcgcgcagggcgtcggcggcgtcgtgcacgtcgtcggcccccagcgtgccgttcgccccggctgacaccacgatcgtgttctcgccccggtggtccacggtgatcacggccgtgccggtggccacctgcgcgctccgcacgccgctgatgtcgaccccggcccgggtcagcgactcccgcaacatctcgccatgggcgtcgtcgccgacggccccgaccatgagggtgtcggcgccggcgagcgcgcaggcgaccgcctggttggccgacttgccgcccggacgcaccaccagcggatcgcccacgacggtctcgccggggccgggaagcgtgcgcgtggtgacggtgaggtccgcgttcagcgagccgagcacccccactcgtccccgacggttggtgacccgttccagcgcactgcgggcagccctggccgcagcccgcacctcgggcgccgacgatgatggatcgctcatggttcctcctggccggtcaacccctgtggacagtcaacccttgtggacggattgtcagcgtgatcggctgaccctgtggacggctggacatggtggacggttgtgctcgtggacgcctgcaccgtgcggtcgcccggaccgtgtggatatccggggccttgtgggggcccgggccttgtcggaacacgggccttgtcggaacccgggccttgtcggaacaccgcgcggccacgcctcaggcgtcggcggcttcgatgcggatgcgttcgccggtgccgagctccagcaccgtgcccacgggcaccagtcgggtctggccgtcggccagatgggacgggctcttgcccggctcgttgatcaccgtcccattggtggaatgcaggtcggtgacggccaccacatcgccgcgctgctcgatgcgcaggtgggttcggctgatgtcgtgcccggggctcggcaccgtgacggcgcggctgaggccatcgtcgaccaccggggcccgacccaccacggcgggacggtcgagcaccgccacctggttgcccgaggtgacgatctggaacagcggcgcccgcgggacggcaccggcagcccgggaggggccggccgtgtcgctggccgacgctccctgcggcgactccacggcaggttcgcgcatcgtgctcgcggccgaggcctgcccggcgggcatcggcggcaccgcaccgggacggtccggggcggcatcgggcagcacgtcagcgcgctgcccctgctctgacggcgcagggaatgccggcgccggcggggtgaagggcgccccggtgcttgccgggggctggagggttgcctcgggttcgaggtcagcgcggccgtcggcaggcctgcggtcgtgccccggatcacccgcgctcgggccgctcggaccgggactttccgcgcccgggctggtcaggcccgcaacgacctcggggtgcgccccggcaggggtcatgtgctgctgaatcccgtgctgctggttcccttgctgtggcgcgtcctggtgcggcgctggctggtgcggggctggctgcggcgcggcatcgccgcttgtgggagcgggattggccggcgtcccgacgccgtgggccggtggctcggcaggctcgtgcggctcccgggaacccacgaccggcgccggggcgctcaggtcgatcgacgactcgatcggcgcaccgaacaacccgacgctgaaggactcgccggggtggttcgcggcgcgctcggaatcgcgcatcaggtcgtcgaccagggacagcccgaggttctcctccgacctgccctccccggacgtgaccgggcggcgacgtcgcggagtcccctcggcggagtcctggccaggacgatgccggcgcgccgagccctcgtcggcagccacgtcggtcccggatgggtcggtcccggcatcggccgatccgtccacgtccggtgtcgcgggggcgtctgccggccccttggcgtcgttggcggcttcgggctcgggagggttgaccaccggcatggcctgcttgtcgggcaaggcctgggtgggttcgaacatgaaggcctcggcgtcggagggtgcgccgacggcaaagccggtgctctcctcgaaccacgcatgggcggcgcgggcggcgtcgggctgtccggtgtccgccaccttggacggcgcaggccgctcgggggcgccgaagacctgcgacgcgccagccgcgggtgctgacgccggcggcgcggatgccggttcgctgccgtcggcggccaggcccatctcgcgcagcacctcgggggatgcgctggaccactggcggccgtgttcggcgccggcctggtcctcatcggcctggtccccctcggtctggctgacatcggaatgcccaccgccggactgctggtcaaccggctgctggtggtcggcctgctgatcgtggggctgccacgcccccggctgccctgcaccagactgtcctgcgccggactgctcggggctggactgctccgcgtcgagggatgtgtcggcggactgctcatcgcgagcctgctcatcggcggtcaactcagccgagccgcgctcgtcgccaccagttgcccgggtgccgacactccaggggcgggcaccagacgcgccatcggtgcgcgcagccgggacacctgcgcgggagacgtcgctccggtccgccatatccatgcgggacacatcgcgcccgtctgccccgacgggctggtcatcggagatgtcctcgccatccaccgcgtcctcatcgtcatcgacgcccatgggggcatcaccgggcgcggaggcaccgccaccatggccgggcgccgcaaggcccgcaccagcaccaaaagcctctgcgccggactcggcgcgttgcacggcccgcacctgcgcgtcgacgctggccggctgacgcgccgcgagggtctccacgcgcatgtccaccagcaccgcggcgcactgcgccatgcccaccgacatctccaattcaggccctgccgacagtggcatcgccgagccgccgtcgtcgcgggcgggcacgatgcgcaggtacagggagctgagcaccgcgtcgcaccatgcgggggtgctgccgccgcgggccagcagctggctcgatcgggcgtccaacacctgcacgccgccacgcaacaggcagcgcacgccgtcggcggtcagtcccgccacggccacctcggacagttgcgccaggccgtgcttgttgagcgtgtcgatcacctgctcgaggggtgcccccgacgacacatcgcgccacaacggctccagtgcggcggggtcggtgctgggcagcgggcgcagcatgacgacgcagcgcggcccggcaaccatcaaccagtcaccgggtgtgtagctgatccgccacatgtcgagggcaagccaggccgactcgccccacagatgcgtcgaaggtgctccgactgcgccgttgtgctcgtccgccattgacaaaaccctcccgatggtgaccatgtccgggctcacgcggacgcacatcagcggcgtccggcggcgaaattcagtctagggcaggcccttcggcgcgcttctcccacggcctgcattccccgggccgcatcgccacggttgcagcctcctcggccacatttccgcggccgtatccccacggttgcagcctcctcggccacatttcagcggccgcactgtcgcggccgtatccccacgcccgcatctccgcggccgcatttccaccgggtgcatctctgcggctccaccgggcgcggttccgcgaccgtgattcccacgggtgcgccccccatgcccgcacagaactgccgacgcacagaactccggcgcaccggtttcccagcacgccggagtccacctgcgtcggcgccgtcagggttgccgcgctcactggccgcggcaaccccggcggttcacctgctacttgcttgcgtccgcctgggcgagcttggccttcgccgcagcgaaccgggcgatcggcacgcggaacggcgagcacgacacatagtcaaggcccaccgactggaagaacgcgatcgagtcgggatccccaccgtgctcaccgcagacgcccactgacagcttcggattggcggcccggcccttctcagtgcccatgcgcaccagctggccgacgccatccacgtcgatcgtggcgaacgggtcacgcttcaccacgccctgcgcctcgtaccaaccgaggaagccgttctcggcgtcatcgcggctgatgcccagcgtggtctgcgtcaggtcgttggtgccgaagctgaagaaatcagcctcctgcgcgatctgatcggccaccagggcggccctcggcagctcgatcatcgtgcccaccaggtagtcgagcttctggccggccttgtcgagctcgtcgtccaccgcagccaccacgatctcgcgctgacgctgcagctcctggcgcaggtgcaccaacggcaccatgatctgcaggtcaaccgtctcgccctcgcggtcgagcacggccaacgcggcacgcgcgatggcgcgggcctgcatgtcgggaatctgcgggtagagcatgccgaggcggcaaccgcgggtgcccaacatcgggttctgctcgtgcagcttcttcacctgtgcgagcgtgcgacgctcctcggccagcttggtcggatcggcgcccttgagctccatctcctgcaccttcagcgcctgggtcaccaggtcgggcatgaactcgtgcagcggcgggtcgagcaggcgcaccgtcaccggcaggcccttcatggcggtgaagatcgcctcgaagtcgctctgctgcatcggcaggatcttgtcgagcgccacctgacgctgctcgtcgttctccgacaggatcatctcgtgcatggccggcagccggtcgtcaccgaagaacatgtgctcggtgcggcacaggccgatgccctcggcacccaactcacgggccttggcggcgtcggtgccgttgtcggcgttggcctccacgcccaggtcgcggatctcgtcggcccaaccgaccaccttgaggaagtcctcgttgaggcgcggcggaatcagcttcagcgccgtgttgaacacctcgccggtggagccgttgagggtcagcgtgtcgccctcgtgcaccgtggcgccgccgacggtcatcgtcttggcctcggtgtcgatcttgatgtcggtggcgcctgccacgcagggcttgccgaagccgcgggccaccacggccgcgtggctggtcatgccgccatgggcggtgagcacgccctgtgcctgcagcacgccatggatgtcatcaggggtggtctcgaagcggatcaacaccaccggctcaccggcctcgccgcgctcagcggcggtatcggcgtcgaacaccgcggcacccacggccgcgccggggctggccggcaggcccttggtgatcggcgtggcgctctggccgggatcgatggccgggtgcagcagctgatcgagctggtcgggctcgatgcggcgcacggcctcttccttgtcgatgaggccctcgtccaccaggtcggaggcaaccttcaacgcagcggcggcggtgcgcttgccgttacgcgtctgcagcatgtagagcttgccgttctcgacggtgaactccatgtcctgcatgtcgcggtagtgggtctccatcttgtgcatggtgtcgaccagctcgccgtacgcctgcggcagcacctccttcatctcgatcaggggacgcggggtgcggatgccggccaccacgtcctcgccctgcgcgttggtgaggaactcgccgtacagcgcgttctcaccggtggaggggttgcgggtgaagcagacgccggtggcggaggtctcgccgcggttgccgaagaccatctgcatcacgttcaccgcggtgcccaggtcgtcggagatgtggttcgccttgcggtagaccttggcgcgcgggttctgccagctgttgaacacggcctccacggcgcgcatcaactgctcgcgcgggtcggagggccaggcgccgcccagggcgtcatcgctgatctgcttgaactccgtggtgagttccttgaggtcctcggcggtcaggtcggtgtcctgcgaggcacccttgcgctgcttcatggcagtcagggcgtcctcgtagatgtgcgcgtcgaggccctcgacgacctcgccgtacatctggatgaagcggcggtaacagtcccaggcgaagcgctcattgttggcctcggcggccacggcggccaccgactcgtcggagatacccaggttgaggatggtgtccatcatgccgggcatcgacacgacggcacccgaacgcaccgacaccagcagcggcttctcggacgcgccgagcttgcgtccggcacgctcctcgaagcgggcgagcgcgtcagagatctgatcgcgaaggcctgcgggccaggtgccgccattgttcatcgtctcgatgcaggcctgcgtggtgaccgtaaagccatcgggcaccggtacgcccagacgcatcatctcggctacaccggcacccttgccacccagcaaggacttcatcgaggcatcgccctcggacagatcgtagatgtacttctcgctcacggctgatatctcctttgacaacacatgtggcaagcaaacggggcctccccgttggcccttatggccgcgacgggggtgcttgcacactcccccgtcgggtcgaactggtcacttctttgacaccatctcgacttctcattgttgaacacgcaacggtcggccgcgtggttttgattgttccggttttgcgccgctagctcaaccccgctcagggagtgagtttcatgctgccggcaggacgacgcaaatgggcgccgaactgcttggcacgcctctccacaatgtcgataacgcgcgccgcggcctcctccaacgccaggccggtggtgtcaaggatcgggcagcccaggcttcgttgcacggccttcacctcgtcaagttcatcgtagatcttggcgaggtccgagtatccgtctttcgtgccatagccgcccagccccttgacgcgccgctggcggatctgcagcaggcgctcggcgtcgatcgtcaacccgacgatgcgccagcgatcgatctcgtagagctgttcgggggccttgatgcccggcacgatcggcacgttgaccgtcttgtagccggcatagcccaggtagatcgacaggggggtcttgcccgagcgcgaggcgccgatcaggcagatgtcgctctcgcgcaacgagtcgggcatcacgccgtcgtcgttgcgcacggcgaactccatggcgctgatgcgttcgaagtagtcggcctccacgccgaccggacgcatcggcacctcgtcggcgctggtcttggccacctgcgacagcgcgatcagcgcatcacccatcaggtcggcatgcgggatcgacttgtcgtcgcaatagcgctcgaccatgccgcgcatctcgccgttgacgagcgtgtagaagatgacccgtcgcgactggcccaccgtggggtcggcgcagtccgagatgtcgtcgaacacctcgagcagggtgtcggcgttgcgcacccgggcatggcgcacgatggtgaagcgctggttgggaaactgcatgcgggctgcacgggccacccgggcaccggtttcacccgaggagtctgcgatgacgtggatctcgagaggggcgctggtcatatccacaccgtcccaccgccacgggggcgttacaagcaggtccacacaactatgagatgagccgtctcatgtgtgcgtaaccaacctgtttgtcggtggtgtggggtagtgcggcgtggggcgggcatgtggggcgggtgcgtcgacgagcggcccgcagctccggtcccactaagtgaggacctttgcaggttagacgacgtaaaagtcctcccctagtgccgcgttgaccatgaggggcgggaccgcggcgtcccaacccgcacttggaagataggtgcggatgaggcaccacagacggtgctttatccgcacctgtctttcgtgggcaccccgtggagggcctgatccctccgagtgacgtgccctatagcggcaccgatcctggctcccccactgataacgacgatgcggccctgcgccccggatccctacccacccgaccgctaccatgctgtcggccgcacgtggtcgcactgccgcgtccacccgccacgaacggggagaacacatgacgtcaatgcccacgtgggaagagttcatggtgcccgcgctgcgcctgctggccgatggcgacatccaccggggcaataccgttgctgccccggtcgccgacgctctggccatcacgcccgagcaacgcgagaagttgctgccctcgggccaaccgcgcttcgcgaatcgcgccaattgggccttgtcatacctgtatcgggccggggcggtggagcgtccgacacgcgcccactaccggatcaccgacgtcggccgccagctcctggcatcgcatccggcaggcctgaccgaacacgacctgcgcgcagtgccggggtatgtgatccccagcaatcaccgcaatgcagcgtccacgtcacccgcgtcggttccggaatcgtccagcaccatccccgccgagaccgccgcgctgtcgcccaccgagcagatcgaggagggcatcgaacgcatccacgaagagctggcgagcgaactactggggcgcctgcacgatcaggacccggcgttcttcgaggacgccgtgctcagcctgttggaggcgatgggctatcccggcacggacggtcgcatcacccgcacccagctctcgcgtgatggcggaatcgacgggatcgtcgatcaggacgcgctcgggctgagtcgcgtctacgtacaggccaagcgctacgacctcgacgccgcagtcggtcggcccaccgtccaggcgttcgcgggcgcgctacagggaaacggtgccaatcagggtgtgttcttcaccacctcccggttcagcaccgatgcccgagactttgccgaaaaactgcccacgcgtgtcgtgctgattgacggcgcgcgtctggcgtccctcatgatccgctatcacgtgggcgtccaggtgaagaagacctacgagatcggcgagatcgacgaggacttcttcgcgggcaccgagctctgacccggttcgaggactggcccggccccgaacgacgccccccacccttcccccactaagtgaggacctttgcaggttaggacacgctaataaattaacgggtcttatagtggtgtgggtgggatcattggtgtatggccattccccccgagactgtcgaggcgttgcgagcgaagttcgatgcgttgctgccgcacctggacgagcgtgcgcagcgtttgacgctcgccgcggaggccaggtcgctgggtcatggggggatcgttgcggtggcgcgtgcgtcggggtcctcccggtcgcgggtgcaggcgggggttgccgagctggaggccggggtggcgccgtcggggcgggtgcgcaggcctggtgcgggccgcaagccgatcaccgaaaccgatccggggatcgtgaaggcgttgctggcgttggtggagcccacccgtcggggagatccggagtctgccctgtgctggacgacgctgtcgacgcagaagcttgccgaggagctcactgcgggcgggcaccgggtcagctcggtgaaggtcgcgcagctgctcaaaggggcagggttcagcctgcaggccaacgccaagcagatcgagggtcgtcagcatccggaccgggacgggcagttctcctacctcaacgcccaggtcatggaccatatcgccgcgggcgatgcggtgatcagtgtggacaccaagaagaaggagctcatcggggagttcaagaacggcgggcgcgagtggcaccccaagggcgcgccccgggcggtgaacgtgcacgacttccgtgaccccgaactcgggaaggtgaacccgtacggggtctacgacatcgcagccgacaccggctgggtctcagtcggggtcgatcacgatacttccgcgttcgcggtcaacacgatccgctcctggtggctcgccgtgggccggcgcacctaccccgatgcgtcccggctgctgatcaccgccgacggcggcggatccaacggataccgcacccggttgtggaagacagaactggcagccctggccgccgagaccggcctggccatcacggtctgccacctgcccccgggcacctcgaagtggaacaagatcgagcaccggctctttgcccgcatctcgatcaactggcgcgcccggcccctgaccagccgcgaggtcgtggtgaactcgatcggcgcgaccaccaccgcatccggcgcacccatcgaggccgtcctggacaccagccaataccccgccgggatcaagatccccgacaagcagatgcacgacctcgaggccaacggcgtcctgacccgccacaactggcacggcgaatggaactacaccctgcaccccaacacgcacacctaaatagttagcggccccttagacgacgtaaaagtcctcccctagtgccgcgttgaccatgaggggcgggaccgcggcgtcccaacccgcacttggaagataggtgcggatgaggcaccacagacggtgctttatccgcacctatctttcccggcggccccgcgtccacacctattcgccggtcgacgcccagcgtcctgaccgggcgcgcagggccagcgtcaggccgcgcgcggcaaggaacccgccgtaggcgatccacagccacaccagcccggcgtcgaagtgccacacgagcgcgagcagcggcaggtggatcaccaccacgaacagccccgcaatcgccaggtagcgggtgtcgccggcaccgatcagcaccccatcgagcacgaacaccagggaggccagcggctgcaggcaggccagcaccaccagggcaccgagcagcaggtgggtgatcgccggatcggtggtgaagatgcggatgatgagcggacgcgccaccaccagcaccacgcccaccacgcacgcctgcacgactccccaccccatggcccgacgcatcacgcgcttggcgccgctggggtcctcggcgcccagatagcgtccgatcagcgcctggcaggcgatcgccagcgcatcgagcgagaacgacaggaagttccagatcgagttcgccacctggtgggcggccaggatgagcgaacccatgcgggtggccaccacggtggtggcggtcagcgagatccacaggcccaggctgcgcaccaccagccagccgccgtgcgacatcgcgtcgaacatgccatgcaggctgggacgcaacggcaccccaccgcccggcaggttgcgggcccgggcgcgccgcgcgatcaccgccacgagcaccaggcaggacgccgcctgcgcggtcgcggtggcggtggccgagccgcggatgccgaacccgaaaccgtagatgagcagggcgtccaggccgatattggtcaggttcaccccgatcgccaccgccatcggggtgcgggcgtcctgcaggccgcgcaacagtccggtggaggccagcacgaccagctggaacggcaatccgaggatcaccagccgcagataggccacggcagccgccgcgacgtcgggggccgggtggtaccagccgatgatggtgggtgcgagcgcccagatgagggcggccagcacggcgccgagcaccgcacccagggccatgccgtcgcgtccggcctcgaaggcaccgcgcggatcgccggccccgaagcgacgcgccgtggtgccggtggtggcataggcgaggaagacgcacaggccggtgacaacgcccaatacattgccgcccaggccgagcccggccagcggcacggcacccaggtggccgatgaaggcagtatcggccagcaccagcagcggctcggacaccagcgaggcgaaggtgggaatggccaacgcgaacagttcccgatcactcttcgtccagatggccacgggtattgagggtaacgtccccgcgcataggggtggacgccaccgcatcccccgggatgccccaagccgggatgccacaagggggtccagtaggaaacaatcggcaccatggaccccgtcgaccgcatgatcatcgaagaatcccccgagagcgccaagcacctgctcgtcatcgactcccccgagcttgccgacgcagccagcgacgtcgccgggcgggtgtccatctactgcgacgatcgccgcgacgccgaccaggtgccccgatcgttgctcatcgaggcgctggacgcggcgacgctggagggcgtcgacctggtgtggatgcggctgccgaaggcgctggccgcactcgacgaatatgccgagcgcatctcggcacatgcgctgcccggcgtgcacctggtggcggccggacgcaccaagcacatgaccctgtcgatgaacgacgtgctcggcaagcacttcaaggcggtgtcggcgtcgctgggacgcaacaagtcgcgggccctgcacgccatcggcgccacgcccaccgagctcacctggccgcgggagaacctgcatcccgaactgtcactgggcgtgatcgcccacggcgccgtgttcgccaccaacaaggtggacgacggcacccgcctgctggcggagcgctgcgccgacctgcacggcaatgacctgctcgacctcggctgtggctccggcatcctggcgacgctgctcgcccgtgccaatccagaggccaccgtgcacggcgtggacacgagcctggcggcggtggactccacccggatcaccagcgaggccaatggcaagcacgtcacggtgcactgggcgtggaacctgaacgactggcctgccgacagcctcgacgtgatcgtctgcaacccgccctttcaccgtggcgtggcgaaggactccgagccggcgctggagatgttcaccgaagccggacgcctgctgcgtcccggtggtgagttctggtgcgtgtacaactcgcacctgccgtggaaggcgcgcctgacggcgtcgatcggccccacgacggtcgagttccagaaccccttctacacggtgacgcgctcgatcgcccgctgagggtcgacgccagcggcccacgcaggataggggcggattaagcacatagacggtgcttaatccgcccctatcgtctggttccccctactaaccggagggttgtggtgaatagacgcctcgaaaccctccacccagtggccgtggcggacccctggctcttcgcgactgagggtcgcggcgcccggcccgatagcctgccgccacgatgagcacctcgatcaagcactggatccccaaccagcacggcgcctgggcgatgctggccgtcccgttcgcggcagcggtcatcctgcgtgcccgggtggctgacgtgcccgcgtggacgatcccgctggccgtgctgtggctggtcggatacctgctgttcaacgcggtgctggcgtggcgcaagacggcccccgcgcgccgccaaccgttacgggctccgctgatctgctactcgctggtctgcctggtagccggtgtggcgatcctgatgaccggcggacttcccctggcgttgtggatcgtcctgttcgctcccctggtggtggcggcgctggtgctggccgcccacaagcgggaacgctcggtgctgtccggcctgaccacggtgggtgccgcctgcctggtgttcttcgtggtgcgctgcggcggttggcccctgctcgcacccggcaccgatgtctggatcggcgcgctgctgtacggctatttcggcggcaccgtgttccacgtgaaggcgttgatccgcgggcgccgcgacgccggatcggcacgtgccggcctcatctggcatggcgcctggttggtggtcgcgttgttgctcggcagtgcggggctggcgagctggtggtggacgccgttcttcgcgctgctcatggtccgcaccgctgccatgaagcacgcgaccaacaccggccacgtgctgcggccggccctcatcgggttcaccgaggtggccctgtccgtggtggcgctggtcatctgcatggcctgacggccgggggtcatctgcatggcctgacggccgggggtcatctgcatggcctgacggccggggtcatctgcatggcccgatcccctcgcgcccccagcgcccgcaaccaccgccggggcctcgtgcaacggggcggtcccgtgcaacagtggaaccatgactgcaatccctgccccaatgattcccctgaccaatggaacccgcggcgagaccgtcaacatcccgcagctcggcttcggcacgtacaaggtgccgcccgccgacacccaacgcatcgtggaggaggcgctggaggtcggctaccgccacatcgacaccgccgagatgtacggcaacgaggccggcgtcggcaaggcgatcgcgtccgccggtatcccccgcgaccaactgttcatcaccagcaagctcaacaacgccttccacgacccgaaggccgcgcacaaggcctttgacgacacgatgaccgccctgggcatcgatgtgctcgacctgttcctcgtgcactggccgatggcgaagaccaccagcctggaagccacgtggaccgccatggttgacatcctgggcagcggccgggtgcgtgccgtgggcgtgtcgaactatcagcccgagcacctgcgcacgatcatcaacgccaatggcgtgacgcccgcggtgaaccagatcgaggtgcacccctatctcacccaggagcccctgcgcgagctcgacaaggaactcggcatcgtcaccgaggcctggtcgccgctggcccgtggcgtggtgctctccgatccgacgatcgaccgcatcgccggcgagctgtcccgcaccgcctcgcaggtggtgttgcgctggcacatccagcgcggcgacgtggtgttccccaagtcgatgcaccgggcgcgcatggaagagaacgccaagatcttcgacttcgagctctccgacggccagatggccgagatcaccgcgctcaaccgcaacgaacgccagggtagccaccccgacgaggtacagggcgtgaagtagggacaaccatcgttgcagcgacctgtcaaccactggccggtgcccatcggggtgccggccagtgccgttgtcggcgcgaaatctccagacctgctgacgccgcccggcgcgcgtccgatactgggggcatgaacccccagccagccccggttggtcagccaaacccgtccggtcgcgacaccgcgcagacgcgcacccgcaggcccatgaccgatccgctcaacccgccgcgcgggttctgggagtgctcacgcccggccctggtgatgttggtgatcgggctggcgatcaacgtcgccgcatggacgcagatgcccgaggtggtgccccagcacgccggagtcacgggacaggttgattcgtggacctcccgcaacggcttcctggccttcaccgtgatctccatcgtcctgttcactgccgccctgctgggtgccagcgcggccgtcggcctcagtagcgaagggctccacgcgccgggcaagcgggccgagcgcgtcacctactggcagcacccggaccgctggccgatcttccggccacgcctgtggtcgttgatggcctggttcaccgggtggttcatcgtcgcgatggccgtgggcgccaacgtctttgcgttgtcgccccgcttcaacctcccgggctggctggccctggtcgtgatcttcggggccatgggcctggagctggcctggttcgtggtgcggatgttccggctgctcgacgccgacgtctgaggcaccggcgcttgtccgctgcaagcttggtgagagctactgcaaacctccttgtggacgcgcaagaatgtgggcatggcgaaacttgatccagaacccatccgtgacccccaggctgatcagttgctgaccccgcagaacagtgtggtcgtgctcatcgacttccagcccggccaatatgcgaccgtcggctcggtctcgcgcgaggagatcgacctgggcgtcgtcacgctcgcaaagctggcgcacacctacgacatccccacggtggtctccacggttgcggtgggcatgggcgtcaacgcacccacggttccccagatcatgaacgagctgcccggcgtcgaccagatcgaccgcaccggcgtcaacgcgtgggaggaccccgagttccgcgcggccatcgaggccaccggacgccgcaagatcatcatggccgggctgtggaccgaggtctgcctggccttcccggcgctcgacatgatcgaggccggctatgagatctacccccgtggccgacgccgtgggcggtgtcagccaggtgaccaacgaccgcgccttcgaccggatgatccaggccggcgcgcacccgaccaccgccctggccctcggctgcgaactgatgcgcaactgggcgcgccccggcaccgacgacttccgccgcatcttcaactggtacttccaccagcagcgcagccttggcctgctcgacgccaagatcctgccctcggtcggacgctgattcggccgacaccggcaccgctgagctgaccaccccacaaccatcgcggttgtggggtggatctgtctggtgggcagtatgtgggcggtgcatgacccggccgtgcaccgcgccctcgtgtcacgccggtcccggcgttaggcgcccagggccttcgcgtcgcgtcgcttgcgacgaagctccctgcgcagggtgcgtcggtcatgtgtccaggtgcgcgcactcagcgaggtgagtgcgtacacgatcaacacatcaaccgacatctggacgatgtccatcgatccggggacgcgcacgatggcgcccgccaggcgcgtcacgagcgtcacgctggtgacggccaacagcagcacgcgcgcccaattgaatcccttgaacaccagggtgctcaacaccacctgcagccccgtgaggaccaccaacgccaccacattggcgacgatcacctcggtgcgcgtgccccccgatgcggcgacctgcccggccacgtcgtggaaggcatcgacggccacctcggagaaggtgatgccgatgccgatcaggatcagcaggaacgccaggatcaacgagaccggccgcttgccgacgtcggacagcatctggtgctgttcctcgtggggggcctcggcatgcaccggcaccgcgctgaggtcgatcaccgggagcgccccgtcggtgcgcagcgtgtcaccgccaccgttgcgggtgtggtagccggtggagaagttctcgagcacgttcaccttcgtctgcggcacggcgtgctcaagcgtcgcgacgatgtggtcgcgctcgacgtcgatgttcggctcgatcttgtgggtcacctgcagggtgaacagcgacaggcccaccgcgcggtcgaaggtgccggccgccagccagtcgacgcgtgcgccaccgggcagcagccagccgggcgggcagcgccagaagcgcacgtggtgacgcttggacggcgacccgtcgacctcctgctggaaggccatgtcctgctggcgtccgaacaggaacagggggctcaccggcgccgtgggatagctgcggcgcatcaccgagccggcgatgatgcgcagggccgagttcaggttgaccgggtcggcctcgacccatccggcgtcctccatggcctgccggatctgcacgccgtcgcccagcagcgccaggttcaccgggtcgcccagcagtccgtcgccggtgcgggtgcggccgatgtagtagtcgggcacgtagagcgcggtgaggatgcggtggaacctgggcagcgccaggtaggcgagcaccaggtagaaggcgatgaggaacagcacatcggccggcctgctgacgcccttgcgcagcaccaccacggccagcatgagtgagaaggccgccgcggccacgaagaagaggttctcgaccaggccgtaggaacgccagcgtgcccaacgcttgctccagccacccggctcggtggtttccgcctggatcgtcaccgccgcattccccccaccgggcgcaatccatggtcgccatcatcggcggaacatgtcgcgtcccggcccggggcagcgtccatcggcaccgataacgggtgtccggtgagctcgcggcgtccatggggtatgggggtgaccatggccgtaattctgccagaccccccggtggccaacgccgtcgccccagtgcgtggccctcgccgttgacaggggcagatgtcgcggcgaccacgagggaattgtgtgcattccctatcggcattggccggaaagatgccaatgtcgggggctgctcgatagccttggcgcatgccacgcttcgagccttttgctgcccttcgctatgccccgtcggccgacctcgacaaggtgatcgcgccgccctatgacgtgctcagcgacgccgacatcgacgagttggaggcacgcgacccgcacaacatcgcctgggttgacgatccccgcggcggcgacgaccgctatgtgaaggccgccgccctgctgcgccaatggatctccgagggcgtcatggtctacgacgaccagcccagcttcaccatctatcgcatggccttcaccgacgccaccggcgcccatcgggtgatctccggggtgctcggcggcctcgaggtggtcgatgagggcgccggcggcgtgctgccccatgagcgcaccacgaagaaggcggtcaccgatcgcctcgacctcacccgcgccacctccacgaacggctcgccggtgtggggactgtcgctggcccacggcctgaccgacgccctggccgcgccgggtgagccggtgggcgagatcaccgtcgacggcgtgcgccacagcgtcgagcgcgtggtcgacccgggccgcgtcgccaagatccaggagatcctggccgccgacgatgtgctcatcgccgacggacaccaccgctactccatctcgcgcacctaccgcgacgaggtgcgcaaggccaccggccgcaccgacacccccgccgagcagacgctggcgttcgtcaacgagctcgtggagcaccagctggccatcgaggcgatccaccgcctggtcgacggcatcagctgggacgacctcaacaaggcgctgtcacgctatttcgacatcgacccgatcgacgaggaactgacgccggccacgctgtccgagatggtcgcgcaggcacgcctggtgctgttgaagcccgacggcaccgcctcctggctgatcccccacgagggggccttcgacgacatgcgcgcactcgacggggcctggctcgagaaggcgctgggcgacaccgatgcccaggtgacctaccagcacgggctggacgagatgcgcacgatggtggccgaccatgccgccggcatcctgatccgtcccaccagcctcaccgagatcatgcgcacggcccgcgagggcctgttgatgccgccgaagtcgaccttcttcattccgaagttgcgcaccggcttcgtgctgcgtcccaccgcatcggtgagcgattaatccgccatcagcttgccttttcagtcaacatgccacgaggggtcggggcacgatagcctgaccccgtgacggcgccgcccggccgacgagggacgtgcagcgccacggatcaggagaggaaacatgaacgaacgcatctccaacgagaagttgcgcggaaagatcatgaccgccgatgaggccgcagcccttatccccaatggagcccagatcggcttcggcggtttcaccggctcgggttacccgaaggaactgccccaggccctggccaacaggatcaaggcagcccacgagcgcggcgaggaattcaccgtcaacgcgttcaccggtgcgtccaccgctcccgagctcgatggtgccctggccggcgtcgatggcatgcactaccgcatgccgtaccagtcggatccgacgctgcgcaagaagatcaacgacggcaccacgctgtacaccgacatccacctgtcgcactcggcccagctggtggccgagggcttcatgggcaagctcgacttcgccgtggtcgaggccgtgcgcatcaccgaggacgggaacatcgttcccacctcgtcggtgggcaacaacaagacctacctcgacatggccgagaagatcatcatcgaggtgaactcctggcagtcgcccgacctcgagggaatgcacgatatctggaatggatatctgactcccccgaaccgtccgatcatcccgatcaacaatgtgggcgaccgcatcggcgacaccttcctgaccatcgattccgacaaggtcgtggcggtcatcgagaccaccgaccgtgaccgcaactcgccgttcaagccgattgacgacgattcgcgcgccattgccggctacctgctcgacttctatgccaacgaggtcaagcacggccgcctgccgaagaacctgctgccgctgcagtccggcgtgggcaatatccccaacgccgtgctcgacggcctgctgcattccgacctcgagaacctcaccagctacaccgaggtgatccaggacggcatggtcgacctgatcgacgccggcaagctggccgtcgcctcggcaacggccttctcgctgagccccgattacgcgcacaacatgaatgagaacgcgaagaactaccgcaagtcgatcgttcttcgtccccaggagatctcgaaccatcctgaggtcatccgtcgcctgggcgtgctgtcgtgcaatggcatgatcgaggccgacatctacggcaatgtgaactccacccacgtgatgggcacccgcatgatgaacggcatcggtggttccggtgacttcacgcgcaacgcctacatctcggcattcgtgtcgccgtcgaccgccaaggacggcgccatctcggcgatcgtgccgatggtgagccacgtcgaccacaccgagcatgacgtgatggtgatcatcaccgagcagggcatcgccgacctccgtggcctggcaccgcgcctgcgcgcccagaagatcatcgacaattgcgtgcatcccgatttccgtgcgcagctgcaggagtacttcgaccactcgctggtgacgtcgaaggccaagcacacgccgcacgacctgcgccattcctacgattggcacctgaacttcatcgagaacggcacgatgaagctttcgcactaccgttgatcggtcggacgccgcatgctggcgtcctgatccatcagattgaacaacgcatgaccgaacaacgcatgaccattgtggcccggcccctgggggaggtcgggccacaatggttttccgggtgatgccgattggcagcacgggatagtggacgcgggttggcagctcggcatggcgatatgggttggcagctcggcatgggcgccgccgattatcggagggaagccggatcagcgtcccaggtagccgccgtccaccgggatgaccgccccattgagatagtccgaggcgccggaggccaggaacaccgtgatgcccttgaggtcgtcggcattgccccagcgtcctgcgggaatgcgggccgtgatctcccggtagcggggattgtcctcgccctgcaatgacgtgttcaggtcggtggccatatatccggcgcgatcgcattgacgttgatgccgtgcgccgcccattcgttcgcgcacgccttcgtgagctgggcgatcgcgcccttcgacgcggcataggccggcacattggcgccgcccgagaacgacaacatcgaagccatattgatgatcttgccgtgcccctgcgcgatgaagatccgcgcggcccgctggctcagcccgaagggcgcctcggcgttcacggccagcaccgcccggtattcgtcgaggggatagtcctcggcccggtggcgggtgatcatgccggcggtattgaccagcacgtcgagaccacccagcgtggcgacggcctcgtcgaagccccggccccgtgatgccgcatcggacaggtcggccaccacgccgtggccctccagcccccggcgtgcccacccggccagggcggcgtcgaccttcgagcgggtgcgggccatgatcaccacctgcgcgccggcctcgagcagcgcctcggcctggccgtgccccagtccggaatcaccgccggtgacgatcgcccggcgaccgctcaccccgaacagtgatgtcacggatggcgccgtcgtgggtgttgtgtcgttcggcaggtccttagccattgtcgccccttccggtggcaggtggaatgagcgcattgctcagtagaactcgaccgtgttcacccggttgaggggctcgcggccatcgaggatgagggtggcgctgcgggcgaacagttcggcgatggagcggtcctcgtgggcgtccaggccggcggtgtggggactgatgatcacattcggcaatccccacagcgggctgtcggtgggcagcggctcgtcggccaccacgtcgagcgcggcgaaggcgagccggccgtccgccagggcgttgaccatcgcggcctggtcgatcacggtgccccgtcccacgttgaccaggatggtgcccggccgcacctgctgcaggatctcggcggacagcagcttgttggtgcgttcggtgcccggcagggtgacgacgatcgcgtccgcctgctcgacggcctcacccagctgtccggtggtgtacacggcggacacattcgggttgtcgtgcacggaacggttgtaggcgatcacccgcgcgccgagcgcatggaagtcgtcgatgcagcgattcccgatgtggcccatgcccgccacgagcacggtcatctgcgacaactggcgcatcaggaaggccccaccccaggtgcggtcgtgcttctgggcggtcagccggggcagcagcttcgcgccggccagcaccccgaagaccgcgaactccgcgagcggtgcggcatggacgcccgccgaggtcgtgaaggtgatccggtcgagctgctcgcggctcagcccggcctggcgcacctgggctcccccgccggcggcggtggtgtgcacccagcgcaggcccgggttgtgctcggccgtccacgccagcagctgggggctctcgccggggatgccatagctggcgtcggcatgggtcagcatggcccggaaggcctcctcctgacgcgcggtgcgccggaacccgggatctccggcgtggtcgccgggatagcgcatcggcggcagcagcgactggtcacggatgagctcgcagcgtggttcccgcgcttcgatgagtaggcacagttcctcgctcagcggcgtggcgacggcaactgtcaggtggtcagccatggtgggcgtcctctccggggaccgggcgcgacgacgggcgacgcccatcggatgtgggccgcgcggtggccccgcccttcagccaagcagttgggcgcgcagttcgtcgggggcatcggcaaatgccagggcccgttgctggtgcagggcgtcgcgcttgccggcgccccaggtgacgccgatcgccggaatgccggcggcctcggcggcctgcaggtcgtagatggcgtcgccgacgtacacggcgtcggaggcatgggcgccttcgtgggccagcgcggcgagcagcggtgccggattgggcttgtgttcgcgggtgtcctccatggcggccggcacgtgcagcgtctcggggtagccggccacgcgcagtccacgttcggccagctcgcgtcccttggcggtgaccacggcggtcccgacgttgtacaccgcgaggtcgtcgagcagttcgggcagcccggcgaaggcggtcaccatgtcatcgtggttggcctgcatgaactggtcgtaggacgcgcgcagcgcctcggccttgtcgccgccctgctcggcgatggtgtcggtgagcggcaggccgatccacgggagcaccgtctcgcggtcgagctgcttgcccagcacgtcggcaaaggcgtgctgccacgccgccaccaccaggtcgatcgagttgatgagggtgccgtccaggtcgaagaggaccagtttccaggggagatcttgggtgctcatggccccagcctagtgagccggcgggtcgggttggccggtgaccgaacggggcgatggggcccgcacgacgatgtgttcacgggtgcattccgtgcacgaatcgggcgtcggcaatctgacagcacgcacgatgtcccaaccccctcgtcggctccgacaagggctgatagcgtcaaaatccccctgaaccacgccgaaccactcgtgacgcggctggtggcggacacggttgtctgctcgtcgaccacgtcgggaccgcggatggtgcggtgcgcccgccttcacaacgacgcgaggacagaccatggcacgcacaccccacgaacacgcccatgcaccccacgaacacacccacgacacgcaccgacaggcccgccccgcgcggcgccgcggcaagctcctgcgggccgtcctggccacgggcctcgccctgacgatgaccgcagcgctgcccccgacacgccgcagccccagattcccgcgtccaccggtccgctcgccgactgcgtgcccctggtcggggacttcgtgaagggctatggccagctgccgctggggctggtggcgcccaccttcggcaacgacggctatgacgccctgcccgtggccagcgacccctcgctgccacgcagcgtcgacctgcgtgacaacagccagggcttcaaccagaaggtggagacggcgctgcgcgatggacagatctatgtgcgcaatatcggtgacaagcagtggcgcgaggctcccatgccctcatgcctggccgggcaggtggttgggatctccctcaatgaggacctgctgatcgccctggactcgcagggctggatctacacgatgggcaatctgctgtccgacccctcgaagtggggttgggtgcgtgcctggggttcgccgttctggttcggcgacggcctgcaatcacccaccaccgagccgaaccggtggtcgctgagcgtgatcggcaaccagaccgaccgcacctacacgatgcccgacggcacccagcagccgatctcgctggccaaggtcacccaggtgacggccctgagccccgacgggtcgaagatctacacgctcgacccgtggctggcgcaggactactcctacgaggtgggcacgccgttcaattcgcggttccgggccacgtcgttgtcgtcgtccggttcggtgcacttcatcaccaatgagtacggcgacatgtacacgaagctgtccgacttcgatatcaatggctcggacccggcgcagttccgctacacatggcgtcctgatgagcggccctcggccaccgatgcgttgcagcacctgctcgatccgagcaccgcggcgatccagctgccgacggccgactgggcccaccaaccgaaggtgccgggcaggatcaccgaccgcatctcgatccattccacccatgccggctcggagaatcgcgagctgcgggtggagggtgagagcgccgccggcatgcacggctactggttcaaggcgctggatgacccggcctggcagttcgcccccaccggcgaggagatccagggccgctggctcgacaactccgagcgtgatcgcagcaccgagacgctcgtggccgactcgccctatgactatgtgggcaccatgccgaccggcggtgagctggtgatcgacaacttcgcctatgcgtcggcacgccatgacgcggcgttgcgggtgggtgacaagagctatccgttggtgctgcacacggtcgacggacgctggggcacggccctgtcgatgcggatgggcttcgtcggcaaggagggtgcgttcggggcgcggccggctggcctggtgaatgcggtgccgcgcaactacgccgcggccattgaggtgccctacgagacgatgctggcgtcgatcagcgaccctgtgctggggcagttcatcgaacgcgaccttgccaaccagcggatgcacgaggtgttcctgtcggtcacgccgaacacgatgaagctgtatgactcgcagcacctgggcggcgacacgaccattcccaacttcaacaagctggtcaccctgggtgaggcgacgccggaggtgtgaccttccggcggatggatccacggcagggatgattgcgcaccatcacggtggcgcgacggcccctgccgtggtcggcgcccacaggtcgtgttcgggcgggactttccataccgggcgcacagctggcggacgctaggctggcagggcattcagtggccggcagcacaccagtttggaggggccgatgagttcccacgacgacgccccgcgccgcacggcgtcgggcgagggccccgccactgcgacgactgagacgagcgctggggcggaacacgcggatccggaatccgggtcgcagggcttcggcactccgccggccacgccgatcgccaccctgccgccgctgtcgccgcatgccggtggcgtgccggtgtcaccgaggaccggggagccggtacggcgtcgcagcatcgtcgccacgcaagtggccttctgggcgtcggcactgtgcgctggaatcggttactcctggtactggttccaggcgatgcacaaggggcagttccatactgcatcgtgggtgacgggatggctgcatccgcgcccgggtggcatgtggtcgctcctgctcgcctgtgggttggccgcggtggtggccgcgatggtcgccctgccctgcgtcaccgcctaccaggcgtggacggggcatcgcttcgcacgcaccttgtcctggtgggccctgggtggatcactgctcggggtgctgttcaactggtgggccgtggcggcgatcccgtgtgcgctggtgggcgtggtgctgctgaggctggggtccagccgcgactacttcgccgaatgggacacgctgcgcgctccagcgccgcaacccgagctgccgacagacgtgttctacggtcccctgccgcgcttccagtgagtcggacgtcgacctgggcgatgcccgtgcggtggacttcatcgcagcgcgctgatgcgctaatgtcttggaagccgtaaggctgtgcgggcgtagctcaatggtagagcgctagcttcccaagctagacacgcgggttcgattcccgtcgcccgctccatctgtgtctggacgagtggtccgtgcgcagttcggtcgcagggtccttcagcggtgccccgcagaatggttgcggatcaaagtccacatggcgcaagacccagaccgcgcgtcatgaggaggacttttacgtcgtctaacctgcaaaggtcctccccatcttcggggacggccacgatccgagcatgacgtggacgcttgtgcggcaatgacgccgcacaactgcccagccaccgaccccagcgaaaacgaaagataggtgcggataaagcaccgtcttcggtgctttatccgcacctatcttctgattccggacctcgagtcttctgatcacggacctcgaggcccccagcggccgcaggcgacgaaccaaattgacgcgaaccaggcccgtcaacccgctcgcgggcatgaaaaaccccggacgcaggcctcggaccccgcgcccggggttggtctttcagtcgctcaccccagggggtgcgcgaacaccaccgtcagtggtcagtcctggggctggcgcttctcggcggcgatgaaccatgcctgctgctcgagcttgttgatcagctcatggagcaggtcggcggtcgacggatcggcggaatccaccgcgtcgtgcacctcacggatggtgcgcgtggtggcctcgatcgacttcacgaccaggtcgactgcgtcgctggagaggatctcaccggcgggcagctcgggaagggtggtggtggcggagacgacgtcggtgcggccgtccggtgccacgtgcagcgcacgcatgcgctcggcgatcgtgtcggaaccctcgcgggcgatctcgacgacgtcgtcaaagttgcggtgcaggtcgcggaagttcggccccacgatgttccagtgcacctgcttgcccgagaaactcagcgcaatcaagtcaacaagcactgactgcagcgaatcacgaaggatatcggaggcgacaaagccgctctcggcgttctgaaggttggtggtggagacttctgcctgatgaatcgcagaaatggtattcgtcatattcactcctctggctcatgggttgcgccacgatccaccaaactgatcgcgcgacgcacacccctataagatgttgtccctcaccctgtacaacgctcgaaccgccgcttttattccgtcacactccggtccgatagcggccaatcccccgcacagctcagggctggaacggactcggacccaccgccggagccttcgccacgttgacggcccactggtccttgccgcggaactggccggcgagcgccagcaccaccacgaccagcgccacgagcgtccacccgatccagcccagggggctggtggccagcacgctcggcgactcgcccgccgccaccaccagtcccaggaaacccgccgtgccattcagtgcggcatgaccgaacaccgacggccagatgttgccgctgcggatgcgcaaccacccgaacaacgtgccaaggatcacgcacgacacgatcatgagcagcacgcccagcgcatcgcgtcggccgaagtcgtagcccagcaggatgagcggcgcatgccacagtccccacatcgccccgctgatcaccagcgcaggccacgtgcccagcggacgcagcgatgacatgaggaagccacgccaaccgatctcctcgcccacggtgaacatcgcattggtggcggaggccggcaacagcatcaccaattgcacgatcaccgtggtgcgcaccgacaacggataggtctgtccggccggcatctgcgactgcaacacctgcgcgaagcccgagaagttcaccaggtcgaggcgcacgagccccagcccggcggcgatgaatgtcaccacgatcggcagcagggcggtgcccaccagggcggccagcgccaacagcagcgtccgcttgaggggccgaatcggccacatgcccagcgacgccagcaccgcgcgcccccgcacccgttgcaccaccatcaccacgaacaatgccgccacggcaggggtgtacatcatgagcggggagagcacgcccatgagcggattctggagtcccttcccactgatccacagcggcgagatcaccaaccacgccagcgcacaggcgagcacatagaacaccacgatcgggagccatcgcacccgagtcacgccgggcgcagtgcctgagggcgagccgggcacagcgcctgagggtccggggccgccaccaccgggcatggcgcgtgctggttgatcgtcgtgactcatggcgtctcctggaggggtccggacgccgccccgccggccgtcccggcagtcatcggcgtcctgtggtgacgcctccatcgaagcactccggcgcgtgccccgcggggccgcccgcgtcatgccgggcatgcaaaagactccccgcccaggaccgaaccgggcggggagccttggggtgaagggctagctctcgtctttgttgaagacgcccttcaggccttctttgacgccattgacggtgtcagcaaccttgtccttggcctcattgagggcaccctcgaccttgccctttgcgttctgcgtggtgccttcggcggccatctcgtcgttgccggtcaccttgccgccgacctccttggccttacccgcagccttgtcgaaggcggactgtgcatcattcatggcagttccttccgtagttgggatatcaatccaaacatccgccgtcttgcccgacgacggcgcccccaagaatacgctgattccacgcctgcgcggacgccacgaggcggccacggaatggctgtaccgtgttcggtgaacaccgttcaccgaaccgccaggggaggccatgaacaccagcgtgatcgacaccggacccgtgtgcgtgctcggcgaaggccccggtgtggtccaccagttctggcaggcgcaccgccgcggccggttgatcgggctgcgcacctcgggcacgaccaccggcgctggacgcgtgatcgtgcgcagcaccgattcctgggtcgacagcctcgacgcggtggcccagcgctgcgcgctgacgcctcacgaccgcatctggatccccggcccgatgggctccacgatgaacctgttcgccgcctgcctggctgttcacaacggcgtggaatggtcgtccgacaagcccgaatgcgccaccatctggcagctcacacccgcccggttgagctccctgctggacgccggactgccccgttcgcagcgtctgcgcgaggtgatcgtggccggcgatagcctgtcgcgcgggcttcgcgaccgggccacgacgcgcggcatcaacgtggtgcactactacggcgccgccgagatgtcgatgatcgcgatgggcagctgccgcgacgacctggagctgttcgacaaggtggaggtccgcaccaccgacggcaccatctgggtgcgctccccatggcttgcacagggatacttgcgggctgctgccgacgcgccccgacggtccggtgccctcacgccactgcggcgcggtgacgacggcttcgtgacagtgggagaccgcggagcccttgatgggcgccggctgatcgtcgaaggacgtgatggcgccgtgaccacagcagggcagaccgtgctcctcgccccgctgctcgagcggctgcgtcatcgggcgcagggtgagctgttcctgctcgggctaccgcatgccgcgctcggccaggtgctgaccgccgtggtgacccggcgcgacgacctgggtccggtgcgagcctgggcgcgcgaacacctcaccggcgccgaccgaccacgacgctggcagtgggtggcccatcctccgctgaccctcagcggaaaggttgacctgcgcgccctggccctggacctggcaggccccgccgatcggccggacgcaccatgagcacccccgccgacaacccggtgatcatcgaggccctgcgcaccccgatcggcaccaccggaggcgtcttcgccgaccagaccaccaccgacctggccgcgcccgtgctcggcgagctggacgcccgactgcccgccggcaccggattcagcgaggtggtgctcggcaatgtgcgcgggcccggtggcgatccggcgcgcgtggcggcgttggccgctggcatcgaccccgccgtgcccgccctgacactcgatcgccagtgcgggtcgggaatggcggccatcgaatatgcatggcaccgctgccgcagccagccgggcgtcgtggcggccggaggaatgcaggccgccagcacccagccgatcaccctgtggccgggccgcgacggcgaaccacccaccgccttcgaccgggcgcccttcgcgccgccgccctggctcgaccccgacatgggcgtgatggccgaccagcttgccgccgaactgcacatcagccgcgaacgccaggaccgctatgccctgcgctcgcacatgcgggccgccaccgcccgcgacgccggtgatttcgacgccgagatcgtgccgattgccggggtgggccgcgaccagcgtccccggggcggcttcacgatggcgcgactggcccgcttccccgccgcgttccgcccgggcggcaccgtcacggccgccaattcctgcggcatcaacgacgcggcagccgccgtgaccatggtggacgccgccacccacgcccacttgccgacccccgggctgcgcgtgctggccgcccgcaccgtcggctacgaccccgaccggttcggcctgggcctcgtgccggccgtgcgcgccgccctcgacgacgccggattgggtctcgaccagatcgacgccctggaattcaacgaggccttcgccgcccaggtgctggcctgcgccgacgcactcgatctcgacgagcaccgcctgtgcccccagggtggggccattgccctgggccatccgtggggtgcgtccggcgcgatcctgctggtgcggctgttcagccggctcgtgcgcgagggcgcgggacgctatgggctggccgcgatctcgatcggcggcggccagggcagcgccatggtggtcgaagcggtgcacccccgcgggaattgatgcacgtgcggcccgccacgcgtcccgatcccgaccgccactcctgccgcgcccccgaatgccggatgccacgcgccactcgcacacgccccctataagccgatatcccccttatttgtgcggacattttggatagttgcccatttgacagcccgggatattgcacgataaagtcatcggtgcactttcgccgccccctgcatatgcacccgacgccttcccgtaaagtcgcctgcgtcccgcacttcgagcgacgaggcccgatcctgcggaatccccccgggacctgatccatcggtacgcacacaccctggtgcgctccgaagagcgtccacgccccttgccgggacgcggcaaccctcacccaaggaggacccccgtgggaagtctgaagacggcattcaatatcgtgcccgcacccaagtcggacattccgatcaccacccagcgcaagcggtggctgcgtgaattcatgaagacctatgccgtgctcatcatcggctatggcggcttctacctgttgcgcaccaacttcaagtcggcccagccattcctgcgcgaccaattgggcctcaccaccacccagttgggcacgatcgggttcggcttctcactcacctacggtttcggcggactcatcctgggtttcttcgccgatgggcacaacacgaagaagatcatctcggcgttgctcatcgcctcgggcgtggtggccatcaccatcggcatcacgctggcggtcacccacaatccctacggctacctgatcctgctgtggtcgctcaccggcctgttgcaatcgcctggcgggccgtgctgcaactccacgatgaaccgttggacaccccgcaagtaccgcggccggttcatcggctggtggaatgcatcgcacaacctgggggcgatggccgccggcgcgctggccctgtggggcgccaacaccttcttccacggctcggtggtcggcttcttcgtggtgccggcgctggtggcgatcccgatcggcatctggggcctgttcttcggcaaggacgacccaatcgagctgggttgggacaagcccgaggtgatcttcggcgagccgcaggccaaggccgatgtggtgacccagcaggtgtccaagggacgcatcctcatggactatgtggtcaagaacccggccatctggttcctgtgcatcgccaacgtcgccgcctatgtggtgcgcatcggcatcgacaactggaatgtgctctacaccaagagcgagctgggattctccgactacaccgccgtcaacaccaccattgcgctggagatcggtgggctgctgggctcactgtgctggggattcttctccgaccggctgggcggacgacgcgcgctgaccgcggcgatcggcctggcgctcgtggtggtaccgatcttcgtctatgcccacgccaccacacccacggtggtgtacgcggcgctgttcttcatcggcttcctgatcttcgggccggtgacgctgatcggcatctcggtaatcggcttcgcccccaagaccgccaccgtggtggtgaatgccgtgccgcgcgccttcggctatgtgttcggcgactcgatcgccaaggtgctgttgggacgcatcgccgaccccaagaagcagggcctggagatcttcggccactccctgcacggctggggctccacgttcaccgtgctgttcgtctcggcgggcgtcgggctggtctgcctggtggctgtggcactgttcgaggagcggatgatcagggccgaccgggagttctccagggaacacccggccgccgacgccgggatttcccagggagcagacgatgagtgaacagcttgacatcaaggcactgctggcgattgccgaacaggtggtgcgccgggcgtccgcgatggccctggcgggccagcagcgcgacctgcaggtgcagaccaaggccaaccgcaacgacctggtgacccgcgtcgacaaggacatcgaggagttcgtggccgccgagctcacgagtcgcaccggctatccggtgctgggcgaggagggccacggcgtcgattcgttcgccgggcgggtgtgggtggtcgaccccatcgacggcaccatgaactacgtggagacccgccgcgactatgcggtctcgctggcgctggtgtccgacggccagccgctgatcggcgtggtggccgatgtggtggccggacgcctctattcggcggtgcgcggccatggcgcaacctgccaccaggacgagcgcgactggacacgcagcgatgcaggtgggcccccgaccgaacccggacgctcgaccgaggagctggcgcaggtgccctctgacaaggggtttcgcgattcgatcatcatcaccgacctcaaggagattcgcgccatgccgcgcctggtggcggcgctggtggaatcacgcgggcaccgccgctacgggtcggccgcgctggagtgcctcgaggtggccagcggacgcgccggcgccttcgtgcacctgtgggtgtcgccgtgggacatcgccgcggcgatggtgatctgcgccgaggccggcgtcacggtgacccggctggacggcacgcccctggacgtgcgccacaaggggtcgatcctggccggggcgccgcgtgcccacgccgagctgctggccaggttggtgtccgacccgacgcagtagtcggcgtcccatagcaagcagcccgggaccgtcggcaaccggaacccccttgccaggacgtccggggccgtccactaggttttggtcgcgttaacaccaaagtcaggcgccagacactcctcctcacggaagcgatcccttccccggagaatcctgcgtgccccgaggaggctgcatgaccaccgccgcgaccagcaccacacccgctcccgacgagcgactcctggaggcgccgatcgagcacggggtgctgtcacacgtcgagcagcggggcatcgagccggtgccggccgacaagcgcaatggcacccccggccagctgttctggatctggttcgcggccaacatctccatcctgggcatccccctgggcgccacgctcatcgcgctggggctgaacctgtggcaggccgtgctggccaccgccatcggcgccttcggctccttcgccgtggtgggcgtcatctccgttgccggacgacgcggcggcgccccctcgctcaccctgtcgcgggccatcttcggggtgcgcggcaatgccggacccaccctggtgtcactcgtctcgaggctcggctgggagaccgtcacgacgctgaccggtgcgttcgcgttgatctcgctgtattcgatcgccaccggcaccaccgccgacgcgaaggcccatccggtgctcacggtggcgtgcatcgtcatcttcgtggccctcaccgtggtggtctcggccaccggccacgccttcctgctgaccgtgcagaagtgggccacctgggtgttcggtgcgctcaccgcgctggtcgccctctacctggccaccaccgtcgactggtcggcgttcatcggcaacgcacccggaccggccagcgcattcgtggtgggcatcggcacgatcgtcgccggcaccggcgtcggctgggccaactcgggggccgacatggcccgctaccagaagctgtcggtgaagacgcgttcactggtcgcctcggcgtcggtgggggccggcatcccgctggtggtggtgatcgggctcggttcggcgctgaccgccggcaattcgtccatcgccaccgcgtccgacccgatcgccgcagtgcaccagtcgctgcccacctgggtgtcggtgccctatctgatcgccgccttcgccgggctgctgatgagcaaccacatctccatgtactccgccgggctcaccaccatcacgctgggcgtgcgcatccgccgcgtgtacgccgtggtggtcgacatcgtggtgacgatcaccggcagcatctacttcatgctgatctccgacagcttctacgggccgttcatcagcttcatctcggtgctcgcggtgccgatcaccgcgtggatcggctgcttcctggtcgacatggcgggacgccgcagctacgacgcgcatgggctgctcgaccttcgtccgggggcacgctattggtactggcacggcatcagccttgccggcaccggcagttggctgatcggactggtggttggattgctgttcatgagcgcgaagatctccgacaccgaagtctggttcgccgggccgctgtcgcacacctggatcggcacgaacgggctcgcctggctggtgtcgttggtggtcgccgccggcctgtacgcgttgttcggtgggctgcgccgcaaggacgacgccgccgcgacactcgccgccggagccgctgcgtgagtgagcccgttgaccgcagccgggggcgtttcctgcacctggggcagatgatcgtcgacctcacggtgtacgtcgaccgcatccccgagcgcgggggtgacgtgttcgccgacaaggcgacgatgaacgccggcggtggctacaacgtgttgtgggccgtcaagcagatggggttgtcgcccgacttcttcggcgcggtgggcaccggcccgatgggtgacatcctgcgcggcgcgatgcgtcggatcggcgtggcggcgcaggggcccacgatcgccgggctcgacacgggctactgcgtggccatgaccgaacccgatggggaacgctccttcatctcggtgagcggcgccgatgcgcagatggggcccgacgagttcgccggcctggccctgcgcgacgacgacctggtgtacctgtgcggctattccttcatgtcgcccggcacgcgcaccgcggtggagcgcttcgctgccgcgcgcacggagtggacgcaggccggcggccgggtgttgttcgatgccggcccgatggtggccgagttccccggatcgagcctgcaggccatgatcgacctgcacccgatgtggtcgatgaacgacctcgaggggtgcttgttggctgagcgccttggggtcgcggcgcgcggtgagcaggagcgctgccggctgttgtcgcagcggctcggggccccggtgatcctgcgggtgggttcggatggcgcttggttcgccgatggcgatgcggcccgcaaggtgcccacgccgcgggtcggggccgttgacaccaatggcgccggggacgcccatgccggcgtgttgggtgcggccctgctggagggaatcccccgtgatcgggccctggtgctggccaactgcgccggtgccctgtcgacgacgcgtcccggtccggcgacctgccccgatcggcaggccatcgaggatgcggccgacaagctcgtgggttccacagactcacttgtgggttccacagactcataggcccaacgggcgcgggggcccaacaagctcatgggtccaacaggcgcggggtccaacaaacgcatggggtgtgacgggttgcgcttgggcgatggcgggccaggggtctgacagcccagggctcaaccccgggtgcaggtgcgataacacccattcctgtgacgtgccactatgggaagcgtgctctatcccaaactgcaggtgcttgacgtggtggcagccgtcattgtcgacggcgatcactaccttgcctgccgacgcgacgccggccttgatgcgggtggcaaatgggagttccccggcggcaaggtgaagcccggagagaccgcccagcaagcgctgaggcgcgagatccgcgaggaactcggcgtcgacgttgaggtgcacgacatgctcacctcgtcgcaaaccaccaagtcagaccgcattatcgacatccgcttctatctggccaccgccgccgaacgtccgacgcacagcgacgcccacgacaagctcacctggctgaccgccgatgaactacccgccctcgactgggcgacgcccgacctggccgccgtcggccagctgaactccaagtacgccctggagttgtcggcgccggtgttgaactaggccgacaggctccgcaattcggaggatcgccccgaccccacccccgcaaaatgtcagtgctccccgctagcatcttcgacatgtcccagaacgctgcgttcgatcagatgacggtcgacatcatcatggactccatccgctacaccatcaataagaagcacctgtcgctggagggcgctgctgagtgcgtaaagggcatgggtacgaatgcccaactcgtcgatgaggcccaccgccaactcgaggaggagagccgcgccatctcgacattcactggggcggtggtggattcgcactcgtacggcgggcagaactggtacctcggccccagcgacagtggccagtggtccaagtacctcgacctcctcagacaaaaagagacaccgggcctggacacgctcgatgaggagaccacccgcgtcacaggactcctcgccaatccccacaaccccggggaaaaacgcaagggtatggtgatgggaaatgttcaatccgggaagacgcgcaacttcgcgggcgtgatcgccaaggcagttgatgcaggataccggttcgtcatcgtcctctcaggaatgcacaacaatctgcgtgagcaaacccaaacgcgtctgacggaacaggttttcagcgggagcgaatggtactccctgacccagagcatctatgacctgggttctgtaacaaacgcgacacaagtggtcgagaatcaacccttcgtgtgtgccgtggtcaagaaaaatactgcgcggctcgccaacctcacccgcatgctcaaggaaatcccggatgagctgttgaagttgcgtccggtgctcatcatcgatgatgaggctgatcaggcaactcccaactcaatggcacagcgcgagaagatctctgccatcaaccgccggatgcgggaggtctgggcgcaggtggagaccgggtcatacgtcggatactcagccacccccttcgcgaatgtgctgattgaccccgacgaggacgaggacctgttcccctcggacttcatcaccacactcgccaccggtccggagtacttcggggcacggcgggttttcggactggccgacacggtcgatgacaacggcgagacagaacccggcctcgacatggttcggcccattcccgccgccgaagcaagcacgctgtttccgccgagcgacgccggcgaccgcgacttcttcgatccaccgttgcccggttcattgaaggacgccttcgcatggttcatcgtggccacggcgatcagacgggcccgcggccagatgggctactcctcgatgctcatccacacgacgcactacacggctccgcatgaagccatgcgccggcgcgtgacagctcttgcgaaagagctggagacccgtgttgggtggcgcgacctgacggcgttcgagcattcttggagtgtcgaggccagtcgtgtggcgcaagaggcgacgatgccgctccccacgtgggacgaggtccggtcacggatccctgccgtgctggccgagcttgaggtggtggttgacaacgcaaaatcagatgatcgcctggactatgaccccgccaatggcactgaccgcaccatcatcgccattggcggcggcaccctggcccgggggctgacgctggaaggtctggtcgtctcctatttcacgcgcacgagcagcacctacgacacgctcatgcagatgggacgctggttcggataccggcccggctatgaggatcttccacgggtatgggtaaccgagggtcttgatcaggactatgcgttccttgctcgtgtggaggatgatctgcgcgaagaaattgagtcggtccaggacagcgacctgacacccgaggagatgggtgtacgcatccgcacccatccgggaagactccagatcactgccgacaacaagatgtacagcgctgaagtggttcagctcggcctgtcagacaccgccaaccagacaacgatcctcgacgggagcgacccgcggataacccacgcgaatctgcaggctgtggagaacctgatttctggcgaggtgcctcaaccgttgaacaggcgcgggaaatacttcatcgtcccggacgtgagtggacagcgggtcatcacattcctccagagcttccgggcacaccccgaccagaaatggctcagcaacaggacgaagcagaacaacttggacaacatgattcactggatacaggaattcgcccccggcgacatctggaatattgtcctggcgggtaattcccggagaatggcacccgacggaatcacagctctgggcaccatgacgattggcgggatcgaattgggctgcctcaatcgctcggtgctacgcaccagcacaccagaacgactcgattttaacgcgatcatgtcacccggcgaccgtatctgcgatattctcccgactgaatacggtgacgcccctcggaacaacaatgcggatcgtcgccggatccgccgttcttatgggcacgggaggggtcttgttgtgatctacccgatcagttctcattcccgcgcttcatcgcaggctcgggagcgaatggatatacccaccgaagagaaccaagtggccttctccatcttcatgccgagtattcgggatgccgacgacagggacggaacattcgtctcggtgcggcgcacctgggaaataccaactgctcccgacgacgaggattttcccgagggggatggcgacgatgagtgattcatacgggacgttcagcctgcttctgggcacgatcgacagagacccggccgtaacgctgagcactgttccagccctgcccggcgacggcctccgcctcggtgctgatcccgggtggcaccgccacatccttgccaaggttccggacaatttcaccatcgcgccacgccgggatgcctccacggagctggccgaatggactgagcccggcaccaatcagcgattcctcgatctgatctgtcgcgacgacgcgctgggccaggtcttcagcgctcttgccgacagcgtgatcgagagcattgaggcgagcgaggaacctccgcacgaggtgctgctgcacctgctcgatcaatggcgtcgcctgttcaggccggccaagccattttccgacaaggaaatgcgaagcatcttcggcagattgtggatgctctcactacttgcggagcggaaccccctgctcgctctggaacgctggatgggttcgcggggggagcaacacgatttcgtgtcaccccggggccagctccaggtgcagtcgatcaagcgcgacggccaggacgtcacgatttccagtttgtcccagctcgactccatagccggcgtctcgttggtcctggtaaggctccatgtcgagctgtccccggacgggcagaacatcggcgacatggttacgaaacttgtcgggatgggatgccctcgcgcgactgtcgttgaagcaatcagcgcgatgggttatctggtgggagtggatgctgatgagtcccgcttcatcgtgccgacgcccccgatcgcatggcatatcaccgacgatttcccgggactgcgctcgagtgacgtttccgagaagcgccgcgcggccatcaccaagctttcctactccctcgatctggagaaggcaccgggacggatgagccccaaggaattgaattccttccttgacgagttggtgtcacaatgatcggacttccccagctgacgtggttcccgaagccgttcagtgcgggcgacactgacggggcaggtgctcagaagaccctgggcaacccagacctcgatcttccgacccttctggtacgcgagacagcccagaacagctgggatgcccgcatccccgggcagatccccttgtttgacatgaggttgcggctgctcgacgacaacgtccgcgatgttctgcgctggaacatcttcggaaatggaatggcccccaaccttggtctcgacgagacgctggacgcccccgccctgtgggcgttggaaatcagcgaccgcggcaccaaagggctgggaggcccgacccgcaacgatctggagccccccgccggacagccgacggactacatggattttgttctcaccctgggtgccccaccggataccgacgcggggggcggtaccttcggattcggcaagaccgccatctacaacgcaagcgcgtgcggcaccgtgctgatctggtcccgcacgggcgcggacgcaggacctcatgagcgtttcatcgcttcggcgatgggcacaagcttcgaacgggacggtcacgtgttcaccggaagacagtggtgggccgtcccgggagccgaggcacgaccggacgattttctccgattcgaaccggcgaccggagccatggcagagcagttgggtgccgcagtttttgagcgcacctttctcgagggggagaccggcacctcgttgctgatcctgcagccccacggatgcgacgagcccgaccaactcgtccggcaatgggcggacgccctgtcgcgctatctgtggcccaaaatgccgataaaccagccactggagcgtcagatgcacatcactctctcctccccggaaggagagcatccgctcgattccccgacgagctccacggtcctcgccgcccgcatgcgctgcctcaacgccatccgccaggaacaggccggcagcagtgagccggccgattccatggtgcaactgctgccgatcgccatactacgcccgaagaagctgctgggtcatctcgcgatgacccaggtgccgaagcttccggacggacagtcctatccggacgacacggccgtgaacagcgtgagttacatgcgcaacaaggcagagctcatcgtccgcgacgaacctctgggaccgatggccaccgggatttctgaatgggttggggtcttccgcaccaccgctgagctcgacccggtatttgctgaggcagaaccacctgcacacgattcatggaacgcactgagcccgaaggacaagaacgcacagtctttcgtcagagtcgccctgcgcaatatccgcgcggaggccgagaagtaccggaatccctcgtggaatgcagccccttccggtgaatcagcccccacgggggtgctgtccgccgagttggcgggtctcatgatcgagaccggagcggtgtccgcggcatcacattcccccatgcggcgacgcatctcgcgcgcgaatccgggcagtcgcgccagtgcacgggtgatcgaggcccaaccgctgccacgctccctcaacgacatcgccgagggaaggcagacgaccagagcgttgattgccgtatccggtaccgccccctcggtgagggtcacgctggaccgcctggacatcgcgatcgacggaggaaaacggctggaatccgacaacgagctccgcgtgatcaaatggctgattgatggctcccctgcggtgcccgagtattccaccgccggcacgcagtccgtgcgggcagcccccgggcagcagatcgcgacggacatcagtttcccggtcgacatggctgtggacttctccttctcggccaaggaggcctgatgcgcgtcatgccctttcgcgtcgcctccgacgcatcgatcacgctcagcaaaccgacactcagcttcggtgaaactgtcgtggaggccggcgatgacgtgaccggctgggactatctgacaccagtcaccatcacgggtcagttcgccgttgaccccgaggaactccaccggtcaaccgatctgaatgattttgaaccggtgagagtcgtcatgcaggtgaactgcgtgtccaccggctggcgctcatacgccgtgacgcccattccaaccgttccgccgttctccgggcagctgatcctggatatcccggccaacaccgtggcggacgcgctcgaggtccactacggaattgtcctcgtggctgatatcactgccgacccccacagcactgccccccacatgaagggcagccgggtcttcaccgatcaccggacccaccgattcatgctcgaaggatcccaatcgggtttccccaccgaggccttcgacttcaacacaacctctctccccccacaggcaccttggcacctgcagttcaacagttcctcactcgagagcccctatcgggcatcggtgcggctgttcatcaacagcagccatccggtgggtagagagttcctgaacggcccgatccctaggaggagccggtcggttctctactgtgatgtcctcagtcagatgcttgcggccgtggcgctgcgcgccagcgacgagctccccgctgccttcgaggagggcacaacgggtgcggtgctcaatggtttgtgcgagcggcatctcggccagaatctctcctcgaccatcgcagcccttcgcggtgagcagcccacccgcgtcttcaccgagttgaaggccactctcagcttcgcggagcccacgaaatgactcacaaactcatcccgcgcctcacgaccccccaggcaatggcgcgtctcgaggacatccggcgcagtcttcaggccagtgtcgacatcctggatctcgtgcaattcaccgacaccggcgcagccccgaacgcaaccggcggagcgaccgcgtcgacagatgatctgcgccgctggcgcgacggcgtgcgcgagcgtctcgatcaggtgccctctggcgccggaaaccggaacgaccgacgctcgctggccctcggacgcgcccttgctgaggtcatcgaccccagccgcagcgacgccgcccacgatggcacctggtcatttctgtccctgtgccttttccccgatgtggtcttcgaccgatggcctccctcaggcatcaatggagccctaccggaggatcgctggatcggcgcccaactcggtcgggatcgcaactatctcaaggtgacatggcgccgctggaccaccctcggatcggtgcttctcgagtccggaaagcctttgggggaggatgagttcgtcgccctgatggaacgctcatcgctcgcgcgcaacacccgactcctccggctgattgcctccgagatcctgcgattcgacggcgaaggggcccgttccgagttcgcccgtcaactggtcaagaacatcaccaaattgaccggccccagagaccttgagttccttgatgaggaggaactgcggcacctcgtcacgacggctgccgctgagctgcgcgaattgcgcgtgccccgtcgggcctcacgggctctccctccaacgggcaactgatcagggcgcatattctggcggtgtgggcctgacacaagcgggatcagaacacgcggatccgcgtggccgcccagagcccgcctcggctgtggtagcccgcaatatgtcgcaccagaaggtccgcgacacctcgccggaagttgccctgcgtcatgccctgtttgcgctcggtcttcgctaccgggtcgacagcgcgctgcccggtatgccgcgacgccgcgctgacatcaccttccggaccgccaaggtggcagtcttcgttgatggctgtttctggcatggctgccccgagcactacgttccgcccaagcacaatgccgattggtggcaccacaagattcacgccaaccaggaacgcgatgccgatacggacatgcgcctgcgcgcagaaggatggacgccggtgcggatctgggaacatgaacctgttgagcaggcagttgaagaagtgctgacccaccttccaccgcgttgagcccggcgccataccttcgagggacatcatgcgcgggtaaagatgtcgggagcggtccgtatgctgtgcccatgagcgatgaactccccctgtacgcagacgaagtctctgttaacgcgcagagcatcgttgacctgatcacgccacagaccgtcggcttcgccaagtttctgtcagccaacgacaccggcgaaacgggagggcaccagtccggattcttggtcacacgcgaggccggacccgtgctgttgccgcttgatcacacgatctggatcgacaagagtcgcatcagtatccagtggctgcatgcaaaccagaccaccgattcaatggccacatggtatacgtccaagcaagaattccggataactggtggaatcaacaaggtaatcgccacgtccatgaccggcgatctcctgatcatggtgcgggtggaggctgacagctacgtcgcaacatgcctcggcaccgaggccgatatcaactatgccagggactccctgtcgctgtcacccaccgcaaccgatcagctcgtccgactggagttgcccgaacccagtaccgaagaggagatggacgaagatgccgtcttcgccggttacacggagggcttgacagatttccctgagaccctcgaagtttccagaagggcgcgggagttctacgccgcgctctcgggggtgccgggcgaggtcacctcggaccctgacaagactctgctcgcgtgggtcgacgccgagtaccggctcttcaggttcatcgaacaaagcctcattttcccgcgcatttcagagggctttgaatcggtggatgattttgtgaaactggccaactccgtcaagaaccgacgtgcggcgcgggcaggtgcctcgcttgagaaccacacggccgaggtgctcaatgggagccggatcatgttcaccccccaagcgagaaccgaactgaacaagatccccgatttcctgttccccgaccaggatgcataccacgatgaagccttcccgtcagaaaagctcgccatgctcgccgtgaagaccacctgcaaggaccgctggcgtcaggtggaatccgaggccgaccgtatcggcaccaagcacctgctgacactgcagaagggcatcagcgccaaccagatgaaggagatgcagtcagcacacatccaactggtggtgccgaagccatatatcgataaatatccgcgcgagtgtcgcccacttatttggaccgtcaagcagtttgtcgaattcgcccgttctcttgagcactgagctccccacacaccagtttcgccacgctctggaccaccggaaccaccacgctgttgccgaactgatgataggcggcagtgtcagacacggggatcttgaagcccttggggaaacccatgaggcgagcacactcacggggtgtcagccttcgtggattcccctcgccacggcgcacgaggatctcggatccgtccttgtagtaacgggccgacagcgtacgggcgacgtcatccgggcccacaatcccgtaaccgaagccattgcccgcggccttgtgcttcgccgcatagttctgcaggtatgcccacaagcgatcactgagtgtgtattttcctgcgacccaggcccgcgacccctccgtgtagggcggttccgccttctcggtgccatcctcgggatgcaggaccgaggccatcgacggacggcccttcggaatctcaatgttgtcgaagttgaactcgatcggatcctcgcggaaacccacgatgaagatgcgatgccgcttctggggtacccagggctcagccccgatcacccggtactccacgtgatagccgagctcgtcgcgcagggtctccatgatcgtcgcgaacgtgcgacccttgtcgtgcgactgcagattgcgcacattctccagcacgaacgcacggggctgcttctcagcaatgatgcgggcaacatcgaagaagagggtgccctgggtcttgtcctcgaaaccggtcggacgccccagtgaattcttcttcgagactcccgcaatcgagaacggctggcaggggaaccccgccacgagcacgtcgtgatcgggcacatcccgggcgtcgacggcctggatgtcatcggcaaagctgtgatccagagtctcctggaagttctccgtgtaggtggcaacggccttcttgtcccactcagaggtgaagacgcagcgtcctccggccccttcgaaccccagtcgggtgccaccgatgccggcgaacagatcaatgaacgtgaagtcacaggactcccggtgcgtcgtctgtctcgcctcgaagagcagcttgatggacgccggtgcccccttgcgaacccactcacccgcagttcgttctgtgacgttcgccaccttcgcgacctgggcctgagtgtgggaccgcgcgtagatctcaaacgctgattccgacatgagagcctccaactcagacctgacggccgctgggtcaaaaaccggagatttcttccggtttttgtcacagggtaacacgaatctacccgccgccgcaccttgaatcgtccacacgattcgaaccttcgtacgacactaaccgacgccactgacactcgcggtacaacaccctgcaagcctcagttacagtactgggcgaagcctgcctctccctcagattcactgcgtacccaaccgggcgccgtccggcacgtcccacaggtttcgcttggactgtgctactagcgtttccggcatgcgcgattcgaagaaccttccccaggacgccgtggacatggcgcgcgcgttcatcgccgactacgcacgacgcaacgatggcgacgtcaccgcgggcgccgacttcctcaaggggccgcttgacacgatgcccgagatcgtggacgaggccctacgccagatgcaggagttcccgcaggcgcgtcgcgcccgcgtcgcctgaacaccaccacctgaggcccgtcgccgcaggccctccgggccccgaagccccgttaagtggccacctgtgcggcgtcattcccgtgtcatgagtcggcacataggtgacagatgagttggcacataggtgtcagctcagggatcgtgtttcggccatcgtccgggtgggcgttgggtgttgggccagtagcgtcggtcggggtcgatgtggtgggtcgacaggatctgtccggtcgtcgggtcgataacggtgacggtggtcgcgtcgagggtgatcacggtggagatgccggcgtgggcggcgcccacgcccagggcgtgtggggcgccgtggtggcgcagggtgatgacgccggccctggggacccgcacgtgcttgacgcggtattcggagtcgcggacgggtcgtgggccggtggggtcgggccggtccttggggctggcccggtagacgtcgccgggggtgcgtcgtgccagtgaggtgtgggggcggcggtggttgtacaggtcctggaagtcctcgagcacggtttgcaggtcggcgatgtcgtgggcgtcgggtttggcgttcaggcgtctcttgagggtctggtggaaccgttcgatcttgccctgggtcgtgggccggtggggtccaccgttcttctggacgatccccatggcctccaggaacaactcgaagcggttgggtccgctgttgggtcctcccagcaggcgggtggtgtagatgatgccgttgtcggtcagggtcgaggccggtggcccgtggagggcgatcgtggcggtgaacgtgtcgagcacggtgtggaccgatacggcacggtgggccgagatgtggagcaggcaacgtgagtggtcatcgagccaggaaatgatgtcggccggggtgccgtcggccagttgccagtgggtgacatcggactgccaggtctggttgggcaggtcggcgttgaaccggatgaatgatgaacggggacgcttgtcgggttcgggcctgaccagcccggcctgatgcaggatcctgcggatcgtggaatgggccgggggccggaccccgtctcgctccaggtgccatgcgatcgtcagcggacccgcgtccaggccctcgccgaccaactgtcgacgcagcgcgatgatccgttcacgcacccgggcgggcgtctggttcggatgcgaccgcggtgccctggaacggggctcgagcccctcggggccctcggcccgataacgagcgaccaaccgatacacgtgctgacgactgatcccgaactcccgcgaagcctgcgccacgctcatcgatccagacaccaccgacatcaccgcaacatggttcttcgacatgcccgagcctgtcacctatgtgccgactcaggtgtcacccatcacctgtcacctatgtgccgacccaacacacggcgtcattcccgcacaactgcccactgagagccattccgtgggcgggacggcgaaccacccgaccccggggacgccgccaggacgcgggtcatccggcctcgccccaccaggacgatggggtcgacaaaagcaccgtcctcggtgctttatccgcacctatcaccccgccaaccccagccggtcgctaagtggacacctgtgcggcgtcattcccgcacaactgcccacttagagggaactgcgggcaccgggccagggaagtgaccaccagagtgacggcccgtgaccaccgctgggctacccccatccgggccccgaaaccccattaggtgttcttcctcgggaggttgtgaacggttcgggtcgtaggggaaggcccccgggcaggatgtgggttaccacactcaatcctgaccacggaggccttcatgacccacgctaacgcacccctgacccctgcgggccgtcgccggttggcgatcgtggtcgtcgaggagggatggtcactgcgcagggccgccgaacggttccaggtctcggcgggcaccgcgaagcggtgggccgaccgttaccgggccggtgagcccctgaccgaccgcacctcacgccctgcgcactgtcccgggcgcctggaccgacgcaccgagcgacgcatcatcgggctacggaccacccgccggtggggaccccaccggatcgcctaccacctccacctggcccgttccacggtcgggcgggtcctcacccgctaccggatgccgctgctggcacacctggaccgcgccaccggcgcggcggtgcgcaggccaccagccgtgcgctacgagaaggccagctgcggggaactggtccacgtcgacatcaagaaacaaggacgcatccccgacggcggcggatggcgcatccacggggcgggctcacgcccacacatcgccaacggccgtgcccgctaccaacgcgcacgcgccggaaagaccgtgtcgggttaccgctacctccaccatgccgtggacgaccattcccgcctggcctactcagagatcctcgacgcccaggacgccgacgcggcggccgggttcatggcccgggccctggactggttcagcgcggccgggatcgccgtcacggccgtcatgaccgacaacggctggtgctaccgctccaaggcattcgcccgggccctgggccccatcacccacgtgcggacccgcccctaccggccccagaccaacggcaaggtagaacggttcaaccggaccctgtccgacgaatgggcctacgcccgcgcctactccaacgaggaagaccgcgagcaggcatactacgcatggatccacgaatacaaccaccaccgaccccacaccagcctcaacggcctcactccctccgaccgcgtacccaaccttgcggggaagaacaattaggtggacacctgtgcggcgtcactcccgcacaactgcccacttagagggaaccgtgcgtggcaagaggggatcgtgaccaccgcagagaagggccccagcccggaagggattgggcactcgccaccagcacagccccgccaccacccaccacacacagcaggggacccgccacgacggcggatcccctgctcagtatcaacggggcatcagccccgggaacgtccggtgtgaaccgagcccagctcagtcctcttcctggaagctctcctcgacggcggcgtcatgtgacgcgatgaggcgcttctcctccgggccgatgcaggccagcagcacgatcgctatgaccacgcacacggtgagcgcaccgaaggtgacgccccagccgaagtgctgcaccatccagcccacgccggtggacgcgagcgtcgcaccgatcacatagccgaacagtccggtgaagcctgccgaggtgccggccacctgacgcgccgacatgtccagggcctgcaggccgatgagcatgaccgggccgtagatgaaggcaccgatgaagaacaggaagaccatgagcagccagtacggcgtgcccaccggcgccagccagtaggcgaccagcgagatgcccacgcccaccatgaaggtgatgcctgtcttggtgcggttgccgtggaacaccttgtcggacacccagccacaggccagcgtgcccaccaggcccgccagctcgaacagcgagaacccggcgatgcccttggtcaccgacacgtggtgcacctgcgacaggtaggtgggcgtccacgacagcacgccgtagcgcagcgcgtagacgaacacattggccagcgccagcagcaccatggtgcggttcttgagcacatgctcccagatcacgcgccagtagctctgctgggcgatctcggagttgtcgacctcaaccttggccgggtcgttgcggaagtcctcaatgggcggcaggccgacggacgccggggtgtcgcggatggtgaggaaggcgaacagggccacgaccagcgcgatgagggcgggcagccagaaggcgctctgccacgagtcgccggtgatggccaggccccacgaggccgccgcgccgacggccatgccgccgacattgtgggcgcagttccagatggcggtcttccaaccgcgctcgttggtggagaaccagtgcaccagcacgcggccactgggaggccaccccattccctggaaccaaccattgatgaacatcatgatcgcgaagatcgcgatcgaaccggtgagcgccggcacgaaggccaccaacaggttcgccacggccgacagggccaggccgatgggcatgaagtagcgcgcattcgaccggtcggacaccgtggccatgaagaacttcgacaggccgtaggcgatcagcacggcattggcgatgaggccgatgcccaccttgtcgatatggccgtccttgagcaggatcggcgcaaccaacgagatgttgttgcgaatcaggtagaagccggcatacccgacgaagattcccatgaacacctggaatctcatgcgcgggtatcgctgcttcacctcggcatccggcaagcgtggcgcgggaagtggtgacgaaagccacgacctcttcctcgccggccgcgcagtgtcagtcgttgacattttgctcctttgcgggtggcccagcaggcgcagggccgcccgccatttgatcacagaacggcccgcccaccaaaggacttactgtcgcgaaggcgcacagggcaacgtttttgcgcgtggcgcgtgctcggatgtgcacgcactcatatcctcacaggaaataagtgcacactgtgttatcgctattgcgcttctctgacagcgaaatccgactctccgccgagccctatatccgcattgagcctccccgacgcaatgcggtattcacccggcgccggcgcgctcccgatcaggccgaggtctcgtcgtcgtcatcctcatcttcggcgacaccatgcaacaacacccggtcaacaccgggaatctccgacatcggcactaccaattcacgcaatggctgattgccgaagaagcgcagctccatcgagatcaggtcgcggtccttgcgcggcaggcgccgggtggagcgcacctccgcggcaaatccctggtcggtggccgcccccaggatcttgcgcagcacgccctgaccgtcctcgtagacgatggtgagctcgcgacgcctgtcggccggcgggatcttgcggatcaggggcccgacgatgaagatcgtcagcaggtgggccacggtgagcatggcccccagcaccaccagtccggaacccaccgacatgccgatggcggcagtgatccagatggtggccgccgtggtgaggccgcgcacgaaattgcgtcccttgaagatcacgccgccaccgaggaagccgatgcccgacacgatctgcgctgcgatacgcgtgggatcgatcccggccccatggccggcgatgcccgcgccgaatccgtaccaggacaccagcgtgagtccgcaggcacccatgccgaccagcacatgggtgcggtagccggcattcttctggtggatggaccgctcaaggcccaccactgagcacagcacgaacgcgatgctcagcaggatgagctcacgcagcgcgagctcggacgacaaaaatggcacagacaatcaatccctcgtcagacttgctcgaagcaccgcggacaccagctcgggcggcagcggtacgtgcacgatcacattgcggtcgcgggcacttccctgggcctcaaggccccccacggcatcaggatcgttggcggccacagcacgatgcaggctggccagctccagcggagtctgccagctttcggcatgcaatggggccgccgagtcgtggatcgtcgagcggatcacggccccgcggggggcgatccgcacctccaggtgacgccactgcaccggccactccgacaccgctgcggtggagaactccacgaaaccgccgcccggggacgactgctggccatccgtcggacgcgcacgcggggtcaccaggttgacgtgggtgtgccccgagatccaggcgatcacctgcggatgacggtgcaacagggcctcgacgtcatcggccaggtgcagctcctcatggtgctcggcgtcgcgatagccgttggtcagcgtcgacaacccgtggtgcgcggcgatgatcaccagccgcggatcgtcggagtcggccgagacctcggccagccgctcggccagccaggtgaactggccatcgttgagggcgccgtcccagaagccggccggattgttcgtgtccagggtgatgatgcgcatcccgggcaccgcgtcccacacgtagtaggcggtatgggtctcggcgttcagctcgctgaagccgtgccccaccggcaggccgtcggccaccaggtggcccttcacatagccctcgcggtcgagcacgcgccggtcggggtcggcgggcaccggaatcgagggaccaccggtgagcaccatcggatcggccacgaagtcgaccagcgcctcgtccgcgggttcatagcccgcggggggttcgaccggcttgcgattgccctgcacatattcgctgtacagcgaactacccaccgctcggccctgcaccagggcgtcatggttgccgtagacggtgagccacggggtgccgacgccggtggcggtgaacggcttggcggccgccgcatcggctccgggacgtcgcggcacgccgcgatcggtgaactcgtcgggtgcggtgccactgggatgccagtaggccgggtcgtcggccagtccggtgggcgaggagggatggcccaccccgagcgccgtcgggtcgacggggccaccggtgaccagtcgcatataggtggccagctcattgtgctgggccgaatcggtgttgtcgcccgtggtcaccgtgacgtcgaggtggtgctgctcggcgaactcgcggatcgacgccgcgaccccctcaatggcgtgcagctcaaggaactcctcaggccggtatgacggcgtcatccgcgtccagcgcggatcgtcggagcggcgctgcaggtaatcggtgcgtgccggcgagatgaggtcggccagctggaagtcggtgagctgggcaaggctgagcagcggctcatccgagggtgtccagccggacgcgtcgccatccccgattcccggagccaactcgtcgcgtgccacatggggctcgcccggcgcgtcggtcagttcgacatagcggccctgatagggctgcgcccgcacgatgcggtggttggtggtgtcagcggtgtcgccgtcggcccggccgtcgtcggtcggggcctctcgagaaatatcagacatgtgcgggctcccccggttcgggattcaactcctcgagcgtacgattcttcgtctcgggcgccagcgcgatacagatgatggtccccagcgcacccacggccgcgaagatccagatggccgagttctggccccaggccttcaccacgttcgggaacaccagcacgcccaggatcgagccgaagcggctcaccgaggtggccaggcccgaggcggtcgcgcggatgttggtggggaacagctccaccgggtagacgaagttgaggatgccgccgccggcgttggcgaacagcaccgccgacgagaacagcacgatgaggaagcccaggctgggcgaggtgttcacgccgatgatggccagcgagatggtgaggccggcgaagctggtgatgatcagcggacgacgcccccagcggtcgacggtgttcatgccgatgatcgacccgatgaggccgatgatggccaccacgcccgaaccgacgatgttggcagtgcggtcgcccttggtgaacggggcaaggatcgtcggggtgtacatcgagatcgcgtagtaggcggtggaatagcagaaccagaaaccacaggtgaagatcgtgcgcttcaggaagcgcggggtgaacagcttgcgggccggcactgcctcgggcaccacgagcttgatgtgctcggccacctgcaggccggtgacacggtgcatcacctcgcgggcgtcctgctcacggccgtgggcgatgagccagcgcggcgactcgggcagcttgatgcgcatgaagaacacgaccagcgccacggcggcacccaccagcagcatcgcgcgccaggcgaggtcgcccatcggcgccacgatgaggcccacgatgtaggcgaacaccgagccgacgaaccagaacgcggccagcgaggtggaatgcatgccccgccgcttgttcgacgagaactccgagaccagcgtcgccgaaatcggatagtcagcgccgatgcccaggcccagcaggaagcggaagatgatcagccacaacaccgagggggcgaaggcggtgagcgccccgaagaccacgaagccgagcaggtcgatcacgtacatggccttgcggccatggcggtcggtcaggtggccgagccacagggcaccgatcagcgaaccgaccagggccgccgacacgatgatcgactgctgcagcgcggtgatgtgccattcgtccttgatcagcggcagcgccacggcgatcaccgtgaggtcaaagccgtccaggaaggtgccgccggcggacagcagggtgacacgtcgctggaagcggcgcatctgcggggtgtccacctcgtcgaagccggtagtggtgagaacttgtggagatccctgtgacggggaggtgccagaggtcatgactgctcctggtcaagggcatggaggcggccaccactggatccgtgctgcgcatcgaccggtgcagtggtccaccacaccgtgagacgtgagacatgccgccccaccgcgcgctgccgccgcgtcgggaacggcgtggttcccgaggtatggacgcaatgcagcctgccgtggagcaggatcccctggtcgacgcgggcacacccgaatcgattcaaaacgattgggacactagccccgttatcaaccggaccgcaaaagacaccaagcggctgaacagcgacttcgtgacgggcgaaaaatccggcctgactagggggttcgggaaccactccaccagcccgtatgacgccatcggtcgacgtcggaccccggggcgaagtcaaaggttcgccccgcgttcatcgggggctcacatccgggccctcgacgtcggaatcatcgatgcggcggggccgtggccgcgcatccatgccggcggcggcgatcagctggtcgatctgctcacggctgatgtgtagctggggcgccaacaccggcagctgcgacaggcgcaggtcgtgggcgaggctcatgaactcctgggggtcgcgggggccggcgccatcgctggcggcaccggggtcggtggccaggttggccagctgcacggccaggaactgggccatcaacgggctcgacagccactcgctgacggtggagtcgcgatccagcgtgcgcgggcgggcctcgccccgcacggtgacgatgccgttgagccggatgtcgcgtgacgacgcccccacggccacgtcgtagtcgccgccctcgaccagccaccggtgcaggtcggcgtcccagacccccaggtcggcaggcggcacgctcagcgtcacctcgcgctgctcaccgggggccagctgcaccaccgcgctggccttgaactcgaaaccggcccgacgataggccgaggtgcgcagggccacgtagagctgcgggatctcgcgtcccacccgggcaccggtattgcgcagggtgaaccgggcgtgcagccccgactcgtcagccgcaaggtgcagcccgttgtagctgaaccgcgtgtacgacagcccgtggccgaagggataggccacctccagctggctggcgttgtaccacttgtagcccacgtgcaggccctcggcatagcgcacctgattgcggtcgccgggaaagttgaaataggcggcggtgtcctgcagccgcagcggaatggtctcggccagcctgcccgaggggttcacctcgccgaacagcatgtcggcgatggccgacccgcccgcctcgccgagcaacgacgcctccaccagcgccggcacctccgacgaccactcggccagctgcacgacgccaccattggtcagcaccaccacggtgcgcggattggcggcggcgatgcgctgcaccagcccggtctgcaccgccggcagcaggatggacgtgcggtcgaggccctccgactcggcgtcatcgggcagcccgacgaacaccacggccacctcggcctcctcggcggcctcgacggcgcggtcggccagttcgtcgtccgactcgcccgacagcaggaacccggcctcgtagcggacgggttcgtcggcacgcccgcggatctcgtccagggggatgtcgagcagcatcgggatcacctgggaggatccaccgccacggaagcgcgggttggcggcgaactcgccgatcacggccagcttcgcgccatgggccagcggcagcacgggattggcggagccgtggttgttcgcgtcgacggcacgattgcgcagcagcacgatgctgcgtccggcggcctcgcgggccacgtggtggtgggcacccacccggcgtccgagctcgcgggtggtgccctgggtcaccttcagcgccagctcgaccacccgcgcgcatgcctcgtcacggccctgtgggctgagcatgccccgggcgatcgccgactggatgtccgccgcgtcgtgcgccaggtcgggtggcatcgccaggtcgacgccggcggcgagcgagcgcacccggtcgagcaccgcgccccagtcggacacgacgagcccgtcgaagccccattgatcgcgcaacagctcggtgagcagccagtggctctcggaacagtaggtgccgttcaccctgttgtaggcgcacatgagcgtccacgggtctgcggtgcgcaccacgtgctcgaaggccctcaggtacacctcgtacagcgtctgctcgtcgatgagcgcgtcggcggtcatgcggcgggtctcctggttgttcgccgcgaagtgctttacgcaggcaccgacgccgcacgactgcaggccctgcacccaggcagcgccgagctggcccgacaggatcgggtcctcggagtagtactcgaagttgcgcccgcccaacggggagcgcttgatgttgatccccgggccgagcaccacgcccaccgactgctcgcgggcctcctcgccgatggcgcggcccaccatggccaccacatcggggtcgaacgaattacccagcgcggccggcaccgggaaggcggtggcgcgcacggcgttgtcgaaccgcatgacgccgacctcggggtcggtcaccttgcgcagcccggccgggccgtcggccagggtgacggccgccacgtccaggcggcccagccccaccgtgtgccatgcgtcggcacccgacagcagcgctgccttctcgtcgggggcgagccgactcacgatctggtgtgcctggcgacgctgctcggactcggggacggatgcggcccgggcgggttggccaggcatggctgcttcctttcacgcccgctccgcgccctccccgcaccgccggcacgtgattgtggggatttgcgcaaaggagcagacttatcgatcgtcgcgcacagtgcatgctatgccgacaattgtgcgcgatgtgcacgccgcttccggcccgcggcacccgggcgccgcgaccagtgcgggccacgacacgcttcctccccttgtcaggggccggtcgacccccagccgcgggacgattcgactggtacgaattaccgtacgccattccgcttttcctgccgccggacgcctccggggaagtgattcccatttaaactagtcgccatgactttgcgtcgctacccaaagggctcggccaagcgactcgaaatccttgacgccgccctggaggtgttcaccactgagggctatcgggccacgtcgctgcgcggcatcgccgagcgcgcacacatcacgccggccggcatcatgcactacttcgacagcaaggaacagctgctctccacggtgctgcaacaccgcgacgcgctggacgtgcgccgctccgacctcgacgcccagaccaatccggtggaatcgctggcccagatcatggactccaatatgaaggtgcccgggctggtcacgctctacctgacgatcgccgcggcggccgtcgacccgcaccatccggcccacgactacctggagcggcgctatcacctgctgtcgggctggctgacctcgtggatcaccgagatgtcgcaggccgggctggtaccgcaggtggtctacccggcgggcgtggccacggcgatcgtggcacaggccgacggcatccagttccagtggctgctcgacccgagtgtggacatgggcatgcacgtgcgtcgtggtggacgccgactgctgggcctgccctatgacaagccgattccccagctgcccaccccgtggacgatgcgccgcgccctgcagcagtacccggtgacgatggtcaccggcgagcgcgtcgacgagccggtgcccgggcactgataggcgcccattcaactggcttgcgctgaaggcgtcccaccaatgggcccggccgatcaggcgccctgcgggtgggcccggcgcgcattccacgccgactccaccatctggtcgaggctgtggcgcatcttccagtcgatgtcgcgggcggccttgtcgccgcgtgccacgatgcgcgccgggtcgccggggcgtcgcggggcgatctcgggggtgaaggcgatgccggtgacccgggcgatcgcgtccatgatctcgcgcaccgacgagccggtgccgctgcccaggttgtaggccttctcgagcttcttgccggccatcatctgctcggccgcggccacatgcgagcgggccaggtcggccacgtgcacatagtcacgcacgcaggtgccgtcgggggtcgggtagtcgtcgccgttgatcttcggggtgccgccactcagcagcaggtcgaagacgatcgggaacagattgtgcgggctggtgtcgtagagctggtcactgcccgagcccaccacattgaaatagcgcaggttgacaccctgccactggtcgtccaccggctccatgtcgtggttgagccattctccgatcagcttcgtctcgccgtagggcgattcgggatgcagggcggtctgctcggtgacctcatcgacgtcgggggtgccgtagaccgatgccgaggagctgaacacatagcggtaaacgccagccgaacgcatcgcgcgcaacaccgagacggtgccggtggcgttctggtcgtaggtgtgcagcggacgcgtcaccgagaccccggcgtacttgaacccggccacgtgcaccacgccctcgcagtggtgctcctccagcgtgcgctgcaccagtccggtgtcgaggatggagccgcgcacgaagggcacgcccccgggcacgaagtcctcatgtccgctggacaggtcgtcgatcaccaccggattgatgcccgcctgctggaatgcctgcacgatgtgcgagccgatgtacccggcgccacctgtgaccaaccaactcatggaagcttcctgtctgtcgtcgtccgtgtctgccgggcgcctgcacgacgcccgttcgtgacaggcgtccaccccacaccacccattgggggcccgacacctgtaggttttccctgcacgcgaatcaacgcgctgcgaggaaccccgcagatcaacgctccgcggtgacctcgtggggcgtccccccagcgggcagccctgcgtgcgggcgccaaccatgttgagcttatcggccgttgccccgatgagactcaccctgcacgggcccgcagcacccctagcatcctgatcgcgccacgttggaggttcatatgcgcaagaactggatctttctgggcattgccacgctcggcttcctgctcgtccgcttcgccatccccaccactggagcgctgacacccagcgccaagggcgcgctggcggttgcggtgttcgccatcatcgtgtgggtcacccaggccgtgtcggacgccctgtcgggcttcctcatcattctgttgttggtggtgtcgagcggcaccaacctggccggctcgttcgccggcttctcgaacacctcactgtggctgatcgtggtgggcttcatcatggccgccgcgatggagaagtccggactgagcgaacgcatcgccctgtcggtggtgcggctggccggtggatcggccctcaagatctactgggcgatcgcgggtgtgatggccgtactcaccttcctggtgccctctatcaccgcgcgcaccctactgatgctgcccatcatcatgggcatcgggcaggccttcggcgccgagcgggggaagagcaatatcgtcaaggcgctcatcttcatcgtcgccatgagcggcacgatgatgagcatcggcgtgctgaccgcccatgtgggcaaccccgccaccgtcggcctgatccaggcagccaccggccacaccgtctcgtggtcggagtggttcaaggtgggtggcccgccggccttcgtgctgtcggcgctgtcggtggtggtcatcagcctcatgtggaagccggagacttcgcgcgtcgagggcgccagggagtacatctccggtgagctggcgcgactgggaccggtgaagaagtcggagtggtacacgctggccgtgttcatggccaccctggtgctgtgggccaccgagcccccgatgctgtcaacgatcgtggtgggcatcatcgcggtgatcctgttgttgctgcccggagtgggcgtgctcaactggaaggaagcccaggagaaggtgccctggaatgtgttcatggtgtacggcgctggcctgtcgatgggcactgcgctgaccacctcgggcgccgcgaaatggcttgccaccaccatgttcggacccatcacgcacctgtcgatcccggtgcagatgatcatcctgttgtggttcatcaccatcctgcaggtgttcttcaccggcggcggcccgaagaccaacgccctcaccccgatcatcctcgcccacgccggtgcgatcggcgccaatcaggcgtcgttcggcctgatcctgggcatgaacatgaaccaccagtacctgttgccggtgagcaatatgcccaatgccgtggccatgggtaccgacttcatcagcagccgcgagttgatccgcaccggcgccgtgatgagcgtgctgggcgccgccttcatgagcgtcatggtgctcacctactggagctggctgggaatggtcggctgaggccacccatcactcgcacggccccgggggaagaactgcccgcctgcagccgccgatgcgtacaaactgggccccgcccggttgccatcctcgtaccatgagatgcgtgactcatgtgttgggaatcgatgtcggcggctcgggcatcaagggcgccccggtggacctccgggccggagagttggccgtgccgcgacgcaaggtattgacgccccagccctccactccggaggcttgtgccggggcaatggccacgatcatcgagcagttcgccgatcagatcgacggtcccatcggcgttgccgtgcctgcgccggtgctccacggcgtgacgccgttcatggccaacctcgaccagtcctgggtcggcctcgacgccgacgcctacctcaccgagaagctcggccgcgaggtggtgctggtcaacgacgctgacgccgccggggtggccgagatgcaatacggcgcgggtcgtggcaagcagggcaccgtggtgctgaccacgctgggtaccggcgtgggtaccgccctgttccatgacggacgcctggtgcccaacaccgagttcgggcacatcgagatcaacggtcgcgatgccgagagccgcgcggcgtcgtcgtacatggaacgcgagcacatcagctacaagaaatgggccaagcacctgcagcgctattactccaccctggagaagttgctgtggcccgacctgttcatcgtgggcggcggggtgagtcgtgagtacaagcggttcctgccgctgctcaacctgcagacgccgatcgttccggccagcctgcgcaatggcgccggcacgatcggggcggcactggccgcatcattgcgcgtcggggcgaacgtgccgccgggggcgcaacgcatcgcgtcggtgcccgactagcgatccggcggtcccatcgcaccgtggttgaccgtcccctccgggcagtcaaccacgcacaaggagatggcggacaccacgtggtgtccgccatctccttcggtccccagcgtcggcccggaggtcgacgatcgaggtctttgggcgccacgccacggcgcccgttggtgccccgggatcaggccgtggccttctccaacttcggcaccatgttgtcgagcatgtaattcacggccagcgtggtaccgaccgaaaaggcactggaaaggtcgccgtcgatcacggccgcatggccagcctgcacggtggacagctgcttccactgcgcgtcatcggtgatctgggtggtgtcgatgtagatcgggaaggccacgatcagatcggcgttgaacaccgacagctgctcactggacacgctcaccgagaaccccgagctactcggcgtcatcgaggcgatggcgggattctgcttgaaccccagcttctccagcgcggccaggcgggtatcaccctcgatgtaggcgccccaaccctggctggtgcgcgtggccacggtgacggtcttgtccttccactgcggatgggcgtcggccaccttcttgtagctggcatccgccgcgtcgagcagctccttgcccttggcgggctggcccagcgcggtggcgatcatggtcacctcctggtccatggtggtcaggtagctggtgccgccctcggggatgccgacggtggtggcgatctgcgcgaggcgatcatggcgatccttgtcgccgctgctcttcacgtcgaggatcaggtcgggcttgaggctggcgatctgctcgtagttgggctccatcgtgccgatgatcgtcggcgcggtggtgtacaggcccttggcccacgggccgacgccctcgccaccgaagttcagccagtcggacgcgcccaccggctgcacgccgagcgccagtgcggtctcagcgtcgccccagccgagcgcgacgacgcgctggggggccttctcgatggtcaccttgccgaaggcggtgtcgacggactgcgggaagcttcccgcggccgcaccacccgaggcgctggcgctggacttcgacgatgaggacgagccggagcacccggcaagcagtagtgacatggcggcgatcagggcgatcactgcgcgacgcagggtcatatcgggcctttcttcacgccaccgccccttcccgccgccggaggctccctcacgcgactgcggcgtgatgggtggcggctgcgatgggccgcaccggtgggtggaggagtggtggctcgggagttgttggttctggaatcgatggatggtggtgtggggtgtttgcacagcatcatcagggggcgcgctcagcctagattaggtaaggcttagcttacaaacgtgagctgttctagactttcacaccgtgacccccaactcgtccgcccctgcgcgcaccgccgagttgtcgtcaccgcatgcacccgacgccacccggcgtcgcctcatcggactggtggtcggcatcgccctgttggtggcggcctgcgccgccagcctggccgtcggatcggccacggtgccgctgcagaccgtctggcaggcactcaccggcgcccatgattccgaggcggcccgcatcatcaccacattgcgcctgccgcgcacggtgctgggcctgctggccggcgccgcgctgggcgtggccggagcgctcatccaggccgtcacccgcaatccgctagccgatccgggcatcctgggcgtcaactccgggtcggccttcgccattgccctgggcgtgggcctgttcggggccagctcaccgggccagtacctgtggttcgccttcggcggcgccctggtggccaccgtggtggtctacctgatcggcgcgtcgggaagcggctcggtgagtccggcgcgcatcacactggccggcatggccctgggggcggtgctcagcggcatcacctcggcgatgcggctggccgacgaccgcaggttctcggtgatccaggcctggcaggccggctcgttcgccgaccggggctgggacgtgatcgtgcccacactgcccttcctggccgcgggactcgtgatcgccgcgctactgggacgctcgctggacgccatcgccctgagcgacgacctggcccgggcactgggcaccaacgtcaatcgggcgcgcctgctcgcactggcggccatcaccctgctggccggcggcgccaccgccatggtgggtccgatcgtgttcgtggggttgatggtgccccacgtggcgcggtggatcagcggaccgcggcagggctggatcatggcgctgtgcgtggtctgggcgccggtgctggtgctggccgccgacgtcgtgggacgcatcatcctgcgtcccggggaggtggccgtgagcatcgtcaccgcattcatcgggggtccggtgctgatctacctggtgcgccgcacgaaggcgggcaagctgtgagtgacacgagcacgaccggacgtgccccggagccgaccgcgatgcgtccgtccgtcgccatgtcgacgatggctccgtggcgccaccgcatcccccggcggatgatcatcgcgtgcgccgtcatctgcgcggcctgcgtggccatgtcactgctggcgctcagcctgggcgactatccactgacgattcccgaggtcgtctcggcgttgttcggcgaccagggcttcgccaccaccgtggtcacccagtggcgggccccgcgggtggtggccggcctggtgttcggtgccgcattggggctgtcgggggcgctgttccagaccctcaccgacaaccccctgggctcgcccgatgtgatcggtttctccaccggctcgtacaccggggtgctgatcgtcaccacgctgggcgccacgagtgccgcttccacctcggtagcggcggtggtggctggcatcatcacggcactcgtgatctacgtgctggcctggcggggcgggatgcagggattccgactgatcgtggtgggcatcgcggccaccgccatgctgacggccatcaacaccttcctgctgctgcggatgcgcaccgaggtggcgatgtccgcgtccatctggggtgccggcacactgtcgctggtgagttgggcgaagctgaccttcgcgctgccggccgccgcgctgctggtcgcctgcacggtgctgctggcccggccgctgcgccagctcgagctgggcaatgacacagcgctggcccatggcacgcgggtggagagctcacggctggcgatcctggtggtgggcgtcgggctggtggccgtggtcactgcagccgtcgggccgatcgccttcatctcgctgtcggcaccgcaggtggcgcgtcggctcgcccgctccgcgggaatcccgctgctcacctcggcgttcaccggtgcgctgctgctggtcggtgccgacgtggtggcccagcacctcaccaccaacccgattccggtgggaatcgtcaccatcgtcatcggtggggcctatctgttggccctgctgttcagagaggctcgctcactgtgaccatcaagtccacccccgactcccccaccacggccggcagcgacgtcccgcacgatgccggtgcagacggtgctggtacccacagcgctggcacccacgaggccggcacggccctcgtcagccggctcggcgccgaacacgtcaagctcgcctacggcgaccgggtggtgtccgacaacctcaccgtgcacattccgcccggatcgttcaccgtgatcatcgggccgaatgcctgcggcaagtcgacgctgctgcgcggactgtcacggctgctcaagccccgcggcggcgaggtggtgctcgacggcaaggccatcagcacctatcgcaccaaggaggtggcccgtatcgtcgggctgctgccgcagtcgtcgacggcgcccgagggcatcaccgtggccgacctggtggcgcggggacgctacccgcaccagggcctgatccgccagtggagccacgacgacgagatggccgtcaacgacgccatggaggtgaccggcgtctccgacctgcgcaatgcgccggtggaccagctgtcgggcgggcagcgccagcgggtgtggacggcgatggcgctggcccagcagacgccgatcctgctgctcgacgagccgaccacctacctggacatctcgcaccagtacagcctgttgaacctgttcgcggccctcaaccggcagggcaccacgatcgtggcggtgctgcacgacctcaaccaggcggcccgctatgccacgcacctgatcgcgatgaagcagggccggatcgtggccgagggcaccccgcgcgaggtggtgaccgagcagaccatgcgcgaggtgttcgacgtggacgccctggtgatggacgatccgatcaccggcacgccgatggtggtgccgcgctgagcggccccataggcagacaccgcgctgagcggcccttgaacggggcgccgcgccgagcggcccggatgcaggcaccgcgccgagcggcccgcgttgcccgttgcccaccccggaccctcccccggccgatacgatcgctccatccaccgtcaaccaatcatcaggagatgcgcagtgccccgcttccgcaggcgtcgccccgtgggtgccggccagcgctgccggttcgcgtccgtgcgggctccgcaattccccaccacccgggaccggtggccggcacacgcctggtggtggcgcacggcgccgaccgagaggtgcgcacaccgccgtcgcacatgaaaagggtgacccgcccccgaagggacgggccaccccatgtgacgggggtccggggggaccgtcagccggcgcaaacgagctgacggcgcatcagaccacccaccacacgctcccggcagcctgcggcatcacgaaccagcagctgtcggctcaccgtgctggcgcatctcctcctcgaagtgttcgagcgtcttgttgcgggtctcgggcaccatgcgcaccatgaagatgatcgccagcacccccagcccggcgaagatgaagaacgtggtggacacgcccacgccctcgacgagcggcgggaaggcgaaggcgacgatcgaattcgccacccacagcatgaacaccgagacacccatcgcgaacgagcgcacccgcagggggaagatctccgacaggagcagccaggtgaggggtccgatgagggcctgcatcgagaacacgaagcacatcaccagcaccaggatcacgaccggcttcgccgccaccccgtcggggatggccagcgcacagatgccgaccagcacatggaaggtggtggtgaggcagaagccggtgatcaccatcgtgcgccggttgatgcggttcatgatgatcaccgccaccgtcacgcccatcatcgacgccagcccgttgagggtgttcgccatgatggccgtgtcggctgagaacccggtgttgctcaacagctgcgtgccgtagtacatgatcgcgttgatgccgctgaactgcgagaacatgccgatgccgattccgatgaacacgatgcgccggatccacggcgtgcgcagatccgaccagctcgccgactcggccttctgatcggcgctgaccaggcagcgcatctccacgagctctgcctccgcccgttcgggcgagcggatcagcttcagcactgccagcgcatcgtcctcgcgtcccttcgacatgagccaccggggactctcgggcaccttcagcatcccgaagaacaacccgatcgccggcagcagcgccaccagcagcatgtagcgccacaccgacaggtggtcgccccagtactggtagatgatcgcgttgatgatgaacgccgagacctggccactgacgatcatgagctcattgcgcgtgacgaggctgccgcgacgttccaccggcgcgatctcggccaggtagaccggcaccacggcggacgcgccgccgacggccagtcccaggatgaagcggaagatgcccagcacctgccaggtgggcgccaggacgcacccggtggtgccgatcatgaagatcagggccagcatctggatgctgcgccgccggcccaggcggttggacacgccgccctcgatgatcgccccgaaggccgccccgaccaccaggatcgagaccacgaatccctcggtgaccgaggtgaggccaaggtcggccttcatgggcgtcagggcaccgttgaccactccggtgtcatagccgaacagcagcccgccgaaggtggcgatgaccgcgatgatgccgagccgcttggaatgcgggccgaccgtgaatggggggagctgattctcttgctgcgacgctggtttcgtacccccggcgtcacgtactgcattggacatgactctcctttctggtcgggccccggctcgacattgcgcccgggcccgacaggggatggtgagcggacccacccggatcgaactcgacgacccgggtggccgactactggttgagggggatggcccgctgctcgcgacgggactgctcggccgcgaaggcggcggccagggcctgccgggcgtcgtggccgtccgaggccaccggcgaacccttctcgatcgcatcggcgaagacgtccagcccgatgcgatacgactcggcgtagcgctcggggaagaagtcgggcagcggcggggtgagatagcccgcgccatcggccaccgtggtggtggtgctggggacattgcccatcgacgccaggcccagggtgccgagcacctcggcgcgctggtcgtatccgtaggtggccaggcgcgagttgtcgatgacgcccagtgccccgttggcgaagcgcagggtgatcaggcaggtgtcggcgtcgccggcgtcgcgcgccagctcgtccaccagtgcggcgctgaacgcggagacctcgacgatctccgagccggccaggaagcgggcggtgtgaagtcgtggatggaggtgtccatgaacatctttcccgggccgcgctggtaagaggcgtcgggcagccccggatcgcgggagatgatgttgacgatcagcggatcgcccacgcgcccgtcggccacattggcgtgcagtgccgccatgttcgggtcaaggcgccggttgaatcccatctgcaacagggtgccggcctcctgcaccgcggccactgccgcgtcggcggcctccagggtgagtcccagtggcttctcgcagtagacgtgcttcccggcgcgtgcgaaggcccccacctgctcgggatggtcctcggcggggctggcgatcagcacggcgtccagggagtcgtcgtccaccagggtgcgccagtcgggcacgatggtggcgccggtgagctcctccacggcgcgggcgtggtcggcgttcggttccgcgaccacggcgaggtcgaagcgcggcgaggcgaagaggttgcgggcgtgcagcgagccgatgaatccggcgccgacgagtccgatgcgaagtgtcatgtcatgtcgctttcgtgtggaggagacgatcagagggccagcgggacgctgcgcaggtagccgcaggtccgggcggcgatgggcagggggtcgtcgggatcgcaggggaacatgtcctgctcgacgatcacgaacagctcggggttgagcaggtgcatctgcgccgcgatcgactcagcggtggggatgcccttgggcggctcgcagatggcgcccagcttgaccgcatcggcgaaggcgaggtccttgtcgcgcacggtcttcatgagctcggggtcaacctgcttgaagtgcatgtactcgatgcgctgcgggtagcggcgcatgatctctgcgctgtcgccgccgccgtactcgatgtggccggtgtcgaggcacaggcccaccgcgtcggcatcggtgtcgtccagccagcggtaggtctgctgctgggtctcgacgtgggagtcggcgtgggggtggaacaccgcccgcagccccgtctcctgctgcacggcccgtgagacctcctcgcacgagcggatgaactgcttccagccctcggtgtcgagcgtcttgtcctcgaggtagtcacccgagagcaggtcgcggtacatggcgggcaggagcaccaggtacttgccacccacggccgcggccagcttggcgacgcgcagcgcctcctgggtgagtgcctcgagctcgtccttcttgtggaaggcgccacccaccgtgccggccgacacgtgcaggtcgcgggcggccagttcgtcggccagctgcgaggggtcggtgggcaggaagccgtaggggccgagctccatccagtggtagccggcctcggcgatctcatcgaggaagcgggtgccggtggtctgctggggatggtcggggaaccagactccccacgagtcgggggcgctgcccagtcgggccctggtggcgggcgccttgtcagtggtggtcatgaagtgctccttgtgctcaggcggagagttcgccgaatcttctgggaccggtcccagattgacgtgagcaactctgcgcactgatgtgggaccggtcccagtatcattcccgggaagaccgcttgtcaacccctcggtccgatcccccgacgcgaaccgaagctgcttgactagacccgggactgcagggcgccggcccacggcgcggcccctcggctgacagaaggcaggagacgcgtgacgcacacagcaggccccggcccggagaacccgtcggtgacgattcgccaggtcgccgcgcgtgccggcgtctccaagtcatcggtgtcgcggttcctccagggcggcacctacctgagcgacgcggcccgcgaggccatccaggccgccgtcgacgagctcggataccgccccaatgcgatggcccgcagcctcaccgaacgacgcacccatgccatcggggcgatggtcaacgaccttcgccagccctggttcggcgatttcctgggtggcctgggcgctgcgctgcaccaccacggctattacatggtggtgggtgacacccgggtggaccggcacatggacgagcgactcatccacaccttcctggagagccaggtcgacggcatcgtcctggccggcacgatgccggtgacgcacgccctgtcggaggcgatcgagctcatgcccaccgtgatcgccggcagtcgcgacttcgatgactcgccggtggacgtgaccacaggcgacgatgcggcggccgccgcgctggtgatgcaccacctgttcgacctcggccaccgccggatcgcccacctcgccggaccggacgcccgctcgttcgccatccggcgtgacagctaccgcgacttcatggccgcccacggactgggcgggaacatcatgatggagagctcggacggaaccgacctgggcggatacgacgccgggcgtcgcctcctcgaacgcggagggaccccacccacggcggtcttcgtctccaatgacttcgcggccgccgggctgctcaccgccgcggccgacctgggactgcgcatccccacggacctgtcggtggccaccatcgacaactcattcctgtcacggtcgggcaccacgcccctcacctcggtggacacgcacagcgaggagcagggacgactcgcgggcgaatcgatcatccgccgcatcctgcagcctgcgtcgccaccccagcgcagcctggtggcaccctcgctgcgcgtccgcaggtccacggcggcaccggcgcggtagtcaccggccggcggcgccgggtcacatgcgctcgggtgccgcaatccccaacaggtcgaggccggtggccagcacgcgcttggtggtggcgcacagcgccaaccgggagctgcgcacctccccctcggacttgagcaccgggcagttctcgtagaacgtggagtacttggtggccagctcgtagaggtaggtgcacagcttgtggggcgtcagctcgtcggccacctcgtcgacggcgtcaccgaagcgcgtcagccacagggcgagttcctgctcgggcacctcgtcgagcacgctgatcgtgtcgcccgacaggccctcggcgtcggccttacgcaggatctggctcacgcgggcgtgggcgtactgcaggtaggggccggtgtcgccggtggtctgggtcatccgcacggggtcgaagacgtagtccttctgcaatgagttcgacaggtcggcgtatttgatggccgccagcgcgatctcgggggcggcgtgctcctcggcctcgtcgagcaggtcgttgaggtgcaccgcggtgccctcgcgggtggagaacttcttgccgtccgccccgagcaccatgccgtagcccacgtgctgggcgctcacccaggcgggcaggtagccggcctcgcggcacacggcgaagatcaggttgaagtgataggtctgctccgaacccaccacgtagatcagccggttggcctccaggtcgtcgacgcggtagcgcacggcggccacatcggtgacgtcgtagccgtagccgccctgcgagttgcgcaggatcgccggggcgtcgaagcccttgacgaagaccaccagggcgccctggtcgagcttggcgatgccgcgctgctcgaggtcgtcgcacacctggggcagcatctcgttgtacatcgactcgccggcatagtcggcgtcggtgagcagcacccccatgcgggcataggtcttgttgaacccggccttcgacaggtcgatcatcttgcgccacatggcgcgggtgtccgcgtcgccgttctgcagcttgacgacgcgctcgcgggcgcggtcggcgaaggcatcgtccgacttcaggtgggcgttggcgcgcttgtagagctcctcggcgccggccaggtcgaggctgtcgaggtcgagcttctcgtcgagtgcctgctcgatgagcatgccgaactggcgtccccagtcgccgatgtggttctgggcgatcaccgtgtggcccttggcgcgcagcacgcggttgaagcaatcgccgatgatcgtggagcgcaggtggcccacgtgcatctgcttggcggcgttgggtgccgagtagtcgatcacgacggtctgcggcagctcggtgggcgtgatgccggcgcgcgggtcgtgcagctggtcggtgacggcaccggccagcacgtcggcacgcaaccggaagttgaggaagccgggcccggcgatctccacgggctcgcacagatcgcccacgtcgagcttgtcgacgatttcctgggccacctggcgcggtggcttgccctgctgcttggccaggcgcagcgccacattcgactggaagtggccgaattggggcttggtggcgggccgcatctcggggtcgatacccgccacggattggacacgttcggacagctgcgagggcaaggacgacatggggatcattgtttcacggccggacgcgcaggccgtcgccgcgcccgcgtcggcggccggggcctgcgcggcgatggctaccgtggcaggcatgcacatcagcgttatcggctgcggctatctcggcgcagtgcacgcagcctgcctcgccggggcgggccatgaggttgtcggcctcgacgtggacgcccgcaaggtggcgggcctgcaggccggcgagccactgttccatgagccgggcctggccgggctgttgggccgcaccgtgggccatggcctgcggttcaccaccgaccccggcacgctgggggcggccgaggtgatctacgtggcggtgggcacgccccagctgggagatgggcaggtgggggttgggcaggtgggaactggccatgcgggcaaccgccgagccaccgggaacccggctcccgacggatcgggcgcgcaggggcccgtggcagccgggcgcgccgacctgtcgcagctggatgcggcgctgcgtcaggtggaggcccatgcctcgcgcacccatcgcacgctggtggtgggcaagtcgacggtcccggtcggcaccgcggcccgggtggccgagcggctgtcgcggtgtgatgccgacctggtggtggcctgggagccggagttcgtgcgcgagggccatgcgatcgccgacacccgggcaccggcccgcctggtgcacggcctgcccgacgaccccgagcaggcccgcttcgcgcgcagccagctggcccgctgccatcgtgggatcgacgccgcgacgccccggctggccgtggactatgccaccgcggagctggtgaagacctcggccaatgccttcctggccaccaagatcagcttcatcaacgcgatggccgagctgtgcgacgccgccggcgccgatgtcaccgcgctggccgacgcgctcggcctcgatccgcggatcggcgcaggattcctcgatgccggcatcggcttcgggggcggctgcctgcccaaggacctgcgcgcactgcaggcgcgggccggcgagctcggcgcccaacccgtcgccgacctgctggggcgcgtggacgccctcaacctgcgcgcccgcgaccgggccaccgatgccctggcgcggctgtgtggcggcggcctggccggacgccgggtggcgatcctgggtgcggcgttcaagcccgacagcgacgacttgcgtgactctccagcgctgggaatcgccgaccgggcgcgggccgccggcgcccgggtgacgatcaccgatccgatggcaaccggcgggctgcgttgcctacgggccgacctggaggtcgtcgacgacgccctcaccgccgccaccggcgccgacgtggtggcgctgctcaccccgtggccgcactacctgcgcctcgaccccgccgagctcggtgacgtggtggcccacaaggccctgctggacggccgcaatgcgctggatcccgacgaatgggaacgggccgggtggcgctatgcgggaatgggtcggcgctgaggttcaggcgattatcgatatcccgatcttttcaatacccctaatcccaccaggaggttatcggtgggcaagtccgcgtcgggacgctcagcggtcgtgctccgccagggcgtcggtcaccgaggtctcgcgctggcccaggatcggcttgcgatgggtcacccggtcccagacgaacttcacgttggcgggaatctcacgcatctcgccggtgcgccaggtggccgtgtcgtgcgattgctcgtcgcccaccccgatggtgtcgtcgatgccgatgctgcggcaggtggccaccgcgcggtcaaggtgatagctctgccccaccacggtgacggagttcaccccgaagatattgcgcgcccgatagcacgagtcgtaggtgtcgagcccggcatagtcggccaccacatcgcggtcgggcacgcccagcaggcgcaggtagctgcgcatcgcgcccggctcggaataggtgacagtgcggttgtcgccgctgaccaggatcactttcaccttctgtgacacgtacaggtcgtaggcggcccgcagccgaccggccaggtagagcgagggcgacccgtcggcattcaacccggcccccagcaccaaggccacgtcgcgactcggggcattctgggcggtgaatacgcgatcgcgggcagcaccgtgcacgagcgcccaggagccggtcagcaccaggcatgcgagcaccaccatgcccaccaggatcacccggagggggtggctgatacgacgacgcactgcactcaccctgaaaaggctatagcgacgcactgacagcgccgggcacacccgcccgggtgtcgcacggccatcccggatacgcgggggcgggacacgacggcgccggcagcggcgccccgggggaaggtcaggctcctggtcatcagctcaacgtgctccgtcctgtgggggtgaatggcgtctggtcgggtgcagcgtgcggtcagtgcccggcggcgagcggccccgggctcgtcctgccggccgggagtccggcgctcaggggcgtgcctcggggtgcatgaaccagcaacgcagcatggcggtgcgttcgtccacctgctcggtggtgcaccgcgcgagctcggggccgccgcaggcacgccgcagcgccgcatgcacatgggaatggggcacgccgctggagcgcgcgtactgcgacaccaacgagttgagctgcttgcgcgagctctccagcgccatgtgcaggcgttgggcctcgggcacccgctcacgtcgatcggcgcgatcatggcgacgcagctgcttgcgttggcgctccttgagcagcgcgctcacctgatcgggctccagcaggccgggcaggcccaggtagtcggcctcgtcctggctcgtggcctcggccggcagcccataggcctgcgagtcgtagagcacatggtcgaaattggcgtgcgagccgagcgcctcgaagctgcccagcaggtcgtcgctggcgccctcggcggcgttcgcctgcgcgatcagcgcctcctcgggtgcccacaggtcgccctcgtcgttcttgggcttgccgatcacatggtcgcgctcacgttccaacagcgtggcgtgggccaggatgatcggcaccgtgggcaggaagacggtggccgtctcgccgcgacgccgggtgcgcacgaagcgtcccactgcctgggcgaagaacagcggcgtcgacaccgaggtggcatagacgcccaccgccaggcgcggcacgtcgacgccctcggacaccatccgcacggccaccatccagcgactctgcgactccgagaactcggtgatgcgctcattggagccggcgtcgtcggacagcacgagcgtggctggctcgccggtgatctggtgcaggatcttggcatatgcccttgccagctgctggtcggaggcgatcaccaggccaccggcgtcgggcatgtgggagcgcacctgggtgagccgcgcgtcggcggcccccagcacggccgacatccactcgcccttggggtccagcgcagtgcgccaggccgacgccgacaggtccttggtgagcggcgcggcgaggtcggcctccacctcgtcgcccatcttggtacgccagtgcatctggccgccgtaggccatgaacaacaccggacgcaccacctggtcgcgcagcgcctgcgcgtagccgtaggtgaagtcgggcgccgaatgcaacgagccgtcattgtggcgttcgtagcggatgaacgggatcggggtgtcgtcgctgcggaagggggtgccggtgagggcgaggcggcgggtggcgggctcgaaggcctcggcgatcgcgtcgccccagctcagggcgtcgccggcgtggtggatctcgtcgaagatcaccagggtcttgaagttctcggtgcgtgcccggtagtggaacacccgggccgcgacgcccgcgtaggtgaccgcggtgccgtggaactggcggctgcggccgcgacgcgacgagccgcccagccccggatccagctggatgcccaccttggcggcggcctcggcccactgggtcttcaggtgctcggtggggcacacgacggtgatgcgctggatgacgcgggcgctcaacagctcggccgccacccgcagtgcgaaggccgtcttaccggcgccgggcgttgccacggccaggaagtcgcggggcgcctggtcgcggtactgctccagggcggcggcctgccaggcacgcagccggttcgacgtgccccagggcgcccggccgggataggccggtgagaagtggtcgaaggctgaggtgctcacgccatgcccctccacatccggccgatcgtgccccgcgcacgccagatccgggccccttcgggccggccgccatggcaggggttggtgcgtacagtgcgcccgaagaaccgcgtcggatcaagcactcgcataggtgaaaggactctagtccatcgggtcaagcccaacctgtcaggccgcatggcgacggcggtggagcgcgtcgggcccatcggtgcgacgtccgcctgcaccggggccacctgaaccgcgcccggcgtccgcctggaccggacccacctggaccgagaccacttgaaccagaactccctctaggtgggcagttgtgcggcgtcattgccgcacaagtgaccactcagcggcccgtccaacagaaatcgggcccgtccccggggactagggccgcccatcaccgccagcacctccaacctccacaagatggtcatctgtgcggcgtcattgccgcacagatgaccacccaaggacgaatccaccaccggcaaccacccgacgccgtcacaccaccaggacacggaccgtccgcccgcgagcccaccaccacgaagacaaggtcgacaaaggggctcttcgcgatccggggtgtagcggggggttgagtctggctggcgtgtcggggtgggtgtgagggtcggggtcttccgatgatgggagttcctacgctgcccatctgaaagaccccgacgtgtcccacgctacctttgctgcccccgatctgaccacgttcgcccgcctggatgacctcggcctcgtggtggtgggccagagagtcctcccggatcgctgcgaggtggcctgccgggtggtggacgatgaccggtggtgtcgcgagtgtgggtgcgaagggatcccccgcgacaccgtggtccgtcgcctcgcccacgagccctcgggctggagaccggtgacactggtggtgcgagtgcgtcgctaccgctgttcggggtgtgggcgtgtgtggaggcaggacaccactggggcggcccagccgcgctcgaaactgtcccggggcggactgcgttgggccctggaaggcatcgtcgtccaacacctcaccgtcgcccgggtcgctgagggtctgggcgtgtcctgggactgcgccaacacctccgtcctggaggagggacgcagggtcctcatcaacgatgagcatcgcttcgagggtgtgaccacgatcggggtggacgagcacgtgtggcggcacacgcgcaggggcgacaagttcgtcaccgtgatcatcgacctcaccccgctgcgcgagggaaggggtcctgccaggttgttggacatggtggagggccgctccaagaaggccttcaaggagtggctcagccagcaagaccctgcgtggcgcgaccggattgaggtggtcgccatggacggcttcaccgggttcaagaccgcagcgaaggaagaactccccgacgcggtggaggtcatggatcccttccacgtcgtccagctcgccggcgatgccctggaccactgccgccagcgcgtccagcaagacaccaccggacatcgaggccggtccggggaccccctgtacggggtgcgcaagaccctgcacaccgggatggatctcctcacagacaagcaacgcacccgcctggagggcgtcttcgcccaggacgctcacgtcggggtggaagccacctggggcatctaccagaagatcgtggccgcctaccgcgatcccgaccccaaggccgggcgagcccagctggcccacgtcatcgaggtcatcagccgcggcgttcccgccgccctcgctgagatcatcaccctggggcgcaccctcaagcggcgcgccacagacgtcctggcctacttcgagcgcccccacacctccaacggcccgacagaagccctcaatggccgactggaacacctgcgcggctcagccttgggcttccgaaacctgacgaactacattgcccgcagtctcctcgaggccggaggattcagaccccaactacaccctcaatcgtgaagagccgacaaaggcaccgtctacggtgctttatccgcacctatcacgccaccaccccaggcgaaggccgctaggtggagggtttcgatgcgtctactcaccacaaccattcacttagtgacgaacccggcaggaccagacaccacgaactcgccgtccggcaccaggccgcgtccggcaaggaaccccactaactggacacctatgcggcgtcattcccgcacaactgcccactcagtgagggttcctactggcgggacaacgagtctgcgacgcaggctcgggccgcccgtcgcaccgcccggcgtgctcctgcaccggaaaccggccgaccccgaggacgccaggacttggggcgtcgggcgtcgtgcccacgatctggatgatgggatcgctaaaagcaccgtctacggtgctttatccgcacctatcctgctggcccccgtcaccagtgccgttatgtggacacctgtgcggcgtcattgccgcacaactgcccactcagtgaaggtttcggcgagacagggggttccggggacggagggctccagcggggccgcgggtttcgacgggacggaggggcccggggggattccggagggacaggggattccgggggggattccggagggacagcgggtttcgacgggacggagggacccggagggacagggggttccggcgggacggagggctccagaggggccgcgggtttcgacgagacagagggtttcgacgaggacgacccgattcgcagggcacggcggctccttaaccggaggacgacccacttcgcagcgcacggcggcccgtgaacaggacgacccctccccaccccaaagttgtccacagatcctgtggacaaggcggtggacaacccgctttccctgtgcagacgcccgccgggcctgtgcacaccggcgtggagccagaaatcacagatctgtaattccagcgataggggtgtgtcggcgccgcaggtcccgtagaacagaaggagcgtcggccatggtctgtggtggccggcgcggcgaaaaggcacatgcgaccactcggcaggccggcaccgtcccccagggctttgcgctgccaccatcggtgagggtgacgcccgatggggtcgccgctgtgtgggcaagccggaatcgtcaccactgttcttcggcttccgggggcccctccccgcgaggggcccctcatgccccgcccggccgcagcacgcgccgcaccgctcaccagcaccgccgacccacagcaccgaccccacgagccccgcatccacaagcgcgcaacgcccaatccccaccagcgcgcaacgcccagcccccccccgcacaccccaacaccgacaaacgcagtgggccccgccgatccgacggggcccactgcgttgtacctgttctgcgttgtacctgttccgcgcttgttcctactctgcgttcttcctactacgcggctgttcccactccgtgcgactgccacgtgcctcgacagccgccactgcttgatgccgccacccctgcgggcagcgccacatcagccttcgcggaacaccactcccatgccaccacgcgggtagtgccaggtgagcgtcccggggggcgccacggccaggcaggtgccacattcgaggcatgccgcgtattccaccgagatggtgccatcgggctcctcggaatacacatgggccgggcacacctgcacgaacagcttgccggcaccggtgcgcctggcctcctcctggtgcacctcgatatgcgactcctcctcgtcggtctcgtacgcgtcgtgcgccagacgctcagggatgcttgccaaatagtcgatcatcacttctcccctctcacagcgccttcagtgcagtgattccgtcgcggacgagctcgccgagccgcacgctcgatttcttgaacgcgcgggtcgccaccttgatggcgtgcgtgcgcggcctggtgtccatgttgaacatgccgtgcatcacatcggcgatcatctcgccgtacgccccgtacatgcgggggctgtcgagcagctcgggcatgtgcacataggtgcgcatgtcctgccccacgaagtcacgctcgagattgcgctcgtagcgggccatcgactcgtcggagtagtccttgtcggtcagcgcacggtgggcggccgaggccgccgccagcgcactgcccgccgccaggtccatgccgcggatggtcaggccggtgttcagggtgaaccccgccgcatcgcccacgatcatcaggccggcgcgatgcagctcgtgggccaccatcgccggaccgtcctcgatggtaaggtgacagccgtattcgcgcagctgacccccctcgagcagcggtgcgatcgccggatgtgccaggaaatggtcgtgcacatcactcgacgccagccccttggccaccaggtcgtcgagccgcagcacgacgccgatcgagatcgactccttgttggtgtacaggaagccaccaccggccacgccctgggtgcagtcgccgaccacggcataggccgtgccctcgtcgcccgagcagtggaaacgctgctcgatcgtcgcggggtcaagcgcgatcaccgacttcacgcccacggccaacgacttcttgggttccttgggacggatgccggcctgctgggcgatgaacgagttcacgccatcggcagcaatcacgatgcgggcgcgcaattcgtcctcgcccgcacgcacgccgaccacctggccgccctcgatcaccagctcatcgaccttgacaccgggcatcaccatgacgccggcctcctcgcactgctcggacagccatgcgtcgagcttggcgcgcagcacgctcaccgcgttgaccggctcggccaggcgctggtcccagtagtcgatcttcaccgtggaggtggggttggcgaagctcaccacattgcgcgtgatgcgccgttccaccggggcgttgtcgacgaacccggggaacacctgctccatcacgcggcagtagaacacgccacccgacaggttcttggaacccggctgggcggcccgctcgatgagcaccaccgaatggccctgctgggccagcttgtaggcggcggtgcaacctgccacaccgccaccgatcaccacgacatcaaagatgtcttcgtcttcgtcagccatcgttacgctttcagggcttcggtcagctggggcagcacctgctccagctcacccacgatgccgtagtcagcggccttgaagatgggggcgttcttgtcgttgttgatcgccaccaccaccttggagtcgagcatgccggccaggtgctggatctggcccgagatgccgacggccacatagacgtcgggtgccacggtgagccccgagacgccgatgtagcggtccttgtcgaaccagttgacgccttcggccagcggacgcgagcaggcaagctgggcgtccatggcgttggcggcgtcctgggcaaggctgagctccgactgctccttgaagccacggccgcaggcgatgatgcgctgggtggtggtgaggtcgacgcgctcgccctgggcgctctcggtggaggacaccgtggccgggtaggcctgcgccgcgacggactccgccgcaaccgggtcaccctcgggggccgggccgccgtccatgatgagcaccgcacgcgcggtgagcgcgtcggtctgcagggtgatgccgccgaagcgcgccacgtgggcaccctcggcgtcaaccttcttgacgctcgacagcaccggggcgttcagccgggcggccaccgcaccggcgagcacgcgctcggcgggacggttcggcgccagcaccacgtcctggtcgccggctgccacggcatcggccacggctgcggcataggcgtcggcgggcacgtcggcgtcggcggtgatcgagatcaccttgtcaacgccggcgatctgggcgtcgcccccggccaccacggtgatggtgccaccgagggcacgacccgcctcgacgaggttcccgatctgggcgttggtcgtcacaatccatgtgttcgtcattgtctcaagctccttttctcacaagaccggtttggctcacagcaccgagtcggcgcgcagggcggcgaccagctgggcggcgcatcgtcaccggaaagaatctgctgcttacgggccggcgcggccggcttctcgctggccgtgatggcgatggcggcgtcgctgacctccaggtcggccacgggcaccacctcaacggtcttcttgccggcggccaggatgtccttcatgccgggcaccttcggcttcacggcgtcggcggccacggcaaccacgagcggtccggtgacctcgaccacgcggcgtccgccgggctggtcctgggtcacgcgatatccgttgtcggtcttctccagcgccgagacttcctggaagcagggccagcccaggtagccggcgaccagcgccgacatcatcttggcgccctcgtccaccgacgagtctccggccagcagcaggtcagcgccgtcgaccttcttcaccagcgcggcgagggccgaggcggtcctggtcgcgttccagtcggcggcggcgtcgtctgccaccacgagtccacggtcgagcccgcgcgacatggcgttcttcttggccatcgagctggccacgtcggcgccacccaccgagatgccgaccacttcggcgtcgccggcgagttcgcggcccagctgcaccgcaaccgggtcgtactcgctgactgccgacttggcccggctccagtcgaccgtgccgtcaccgcgcacttcggcgtcctgggggttcggtgcatatttgtatgccacgacaatcgtcatcgcagtgacctttccgttatgtgtcacttgcatgtctgtgttgcattcgccccgacgttgaacagccacgacgataaaggggttctttcacaatagttggcggacgaaatccacacccctgcgttgatctcgtccaattgtcccgcggtcaccagaggtgccaccgcggaggatcttgtggtgtcatgccggctgcccgaccccgcccagccctgcgcgcagcatgggattgcgggcccgttccaccgacaggtaggtgcgcccgccgtggccgggccacagctcggcgtcatcggccagcgcgccgaggcgggcggccgtggccaccagcgcgcgcgggtcggcccgcaggtactcggtgctgccgaccccctgggcgaacagcgtgtcgccggtgagcagcacgccctgtgccgacggccacaggcagatgctgcccggcgtgtggccgggggtctccagcacctgcacggtgtcgtcgccgaactcgatgaggtcgccctcgtccagtgcccggtctatgcgggtgacggcgtagtcgctgccctcctcgtcgaagccggtgaggtgcgggtcggccatcgcggcggcgtcggcgcgtccgcacatgatgggcaccccgaaggcccgggccacctcattggcggcgccgatgtggtcggagtggctgtgcgtgagcacgacgccgaccacgtcgcggccggcaagccatgccagcagcagcggcgcctcggcgcccgggtcgacgaccagcgcacgcccggcgctggtgagcacatagcagtttgcctgatagctgccgaacgggactgactcgatggtgaacaaggccctacctccccttgaattgcggtgcgctggtttctgacaggtcgtggccgcgcgtctcgggcgcccacaccagtgagacgacgaagccgacggccgagatgatggcgccggcgatcatggtggcgcccatgccctggcgggcgatgaatcccggcaggatatagatcgagacgacggtgccgatgcggctgacggccatggccacgcccatcgccgagccccggatgtcggtggggaacagctcattggggtacagccactgcaggttgcccggcccgccggagaacagggcgtacagcgcgaagcagatcaggatcaccagggtggtgggtgccgggatcgcacccagcacggccagtgccaccgtcatcacggcgaacgatccgatcaccagcttgcgtcgccccagcgattcggccaggaacatcgccgggatggtgccgatgaggaagaaggtgcccaccaccatctcgccgagcagggcgttgcgtccctcgcccaggcggaaggcgttggagatctggggtccgtaggtgtacatggcgaacatcgggatggcctggcacagccagatgacgccgacgaacagcacccgccacaggtaggggcggctgaacaccttggagaacttggtgcgggtgggttcgggttgcaggcccagttccacgtcctgcccgtagaggccgcgcaccacctcggcggcctcctcggtgcgtcccttgctgtagagccagcgcggcgattcgggcaccgaccagcgtccgatgaggatgatgacgcacgggatcaccgagctgccgagcatccaggtccagccgcgggtgacgttgtcgaacaggtagccgaccacataggcgacgttggcgcccaggtaccacacggccgcgatcgcacccatggccatggcccggtatttgcgcggggtgaactcggcgatcatcgaggtggcgatgggatagtcggccccgatcaccacgccgatcgccagccgcagcacgaacagctgccccggcgtcgacacgaccatgcacagcagcgacagcacgccgatgaggatcaggtcgatcacgaacatcttgcgacgtccgatgaggtcggtcacccagctgccggcgatggcgccgacgaagacgcccaccagcgcggcggcaccgagcagtccgctccagtgctcgttgatgcccaggtcgggacccatgtgcaccagcgcgacgccgatgatgcccagcacatagccctccaggaagggccctccgctggagaacaccaccaccttgcgcagggcacggctcatgccgacgtcctccaggctcactggttgttgcgacgtcagctgttgcgacactggttgctgtggcattgttccgccctccttcgtgctgtcgtggtgccctgttcttcgatgatcggttcccgtcggttggctgcgctgatggtgtgcggtccctgcgtacacggcgagttgccggcccgggacaggccggcaaccaccgaagccacagggctcacccggaatgctggttccgggtggtggacccaccgtggtggtgggcccagccgggctcgtgcctcacttgtattcgatgattccccagttgaggtgcggcttggcgccggtcgtgtcgacgtcgtcgtccaccaggcggaagcgcagctcgccctcgccgaccttccacatctgcgtgcgcagggtggagccgggcagcaccggggaggtgatgcgcgtcttgaagcgggtgatgcgctcgggctcgccgggcacgaaggtgttgatggcatggcgcatcacgacgcccgcatagctgatggcgtgcaggatcgggcggggctcgccgttcttggcggcgtactcccagtcgatgtgctgcgggtggtagtcgaccgacaggcggtagatgagcgcctggttctcggggatgcgctcggtgacctcggcgtcaggtgcccggtcgggcatgtccaccaggtccttggggggcttggggccgccccagccaccgtcgtagatcaacgcgtcccacgactcgttggtgaacagcaggttgccctcggcgtcgtagctgtcgccgatgtgctgggccagcaggcccttgccctcgccgcggtcgtagaggccagccagcttcaccttggtgctgatggtgtcggccatcttggtgatcggctggtggtacttgatgtcgaagccccagtgcagcgagccggcgtagttgtagccgtagtcgatggtgcgggtgacttcggagtcgacgatgagcatcgcaccgaacatcggcagcaccttgaggctggggttcagcgggtcgtgctcattgatgtattccaggccgtccttgccgtcgataccggcgccgcaacccagtgcgaacagctcgaggtcgcggaagttgtattcgcggacgaatgggccgaacgtctggcccaccatttctgtcttgatcctgttcataatgaccttccctttgccgtcattaattccttccgcaagaggtccttgcggatctttccgtaattcctccgaggcagctcggagctcacgtgaatggcttcgggcaccttgaagtacgccaatcgttcggcgcagcgcttgcgaatctgctcaacatcgagcttcacgccgagcgccggcaccacaaaggcctcgatggcctcgtccttgatggggtcgggcacgccgaccactgcggcgtcgaccacgccgggctggtgcagcaacgcgtcctccacctcggccgacgagatggtctcaccggccctcttgatcacgtccacgttgcggtcgacgaagtagaaccagccgtcggcgtccatgcgtccgcagtcgctggtgtgcatccagccgtcgtcggtgaagcaggcgtcggtgcgtgccggatcgcgccagtagccggccatcaggctgacgcccggtatgccgcgcacctggatctcgccgacctcgcccaccggcatcggatgtccggcgtcgctggccacccgcacccggtagcccagccgacccgacccaccgagggccaccgcgtcggcccgaagggacgctcggtgagcacccccaccaggctctccgacgacccgtagttgttgagcaggcgcaccccgaagcggtgttcgaaggcggccttctcgtcgtcggtgatcggcaggaagtagtgcaccaggcgcacctggtggtcacgctcgtcgggcgccaccggctgggccatcatcgtgcgtaccatcatcgccatcgactggatcagcgtcgcccgatggcgccgcacctgggcccaggcccgggtggccgaatagcgcttctcgaagatcatcgtggcgccggcggtgatcaccggggccagcgccgacagctgcaggttcacgtgcgtgcccaccatcgacgagtagaaccggtcgtcctggcccatggcgagctgccagttgacgaacagccccgagaacacgaagttcgcgtgggtgagcatcacgcccttgggcctggcggtggtgcccgaggtgaacatcacctccagcaggtccgacccgtccagcgccggatgcacgccgggctcgggtgacgcctcccccaccgtggtggtgaagtcgagcacccggccgggcttgtgttccgggttgccccccagcgacagcacggtgccgatggcggcgagttgctcgtcgccatggatcgccagcagctccggttcggtgaccagcaccagcggggtggtacgcgccacgatgtcggcgcactccacccgcgaataggccgggctgatcggcaccagcacgccgccgatcttggccagagccagcaggcaggcgatgaactccggggagttgtacaggtgcacggcaacccgggtgcgctggccgacgccggcgtcggccagcacatgggcaacctggttcacccaggcgtcgaattcgccgtagctgtatgtgcgcacctgcccggtgtcagggtcgccgaacacgaggaactcggccgtgcgccgggagcgcacctggtggtcccagatggctcccagcgacagctcctcgccggcttccgcggcatcccacatcgtcatctctcctgcccgccagggcctggttcagctctcgtcctggtcgccgaagcgcaccttgcccgacgccttgaagcgctcgatgtcggccgggctgaagccggccttggcgagcaggtcggcggtgtcgtagcccaggggggcatcggacgccagaattggccggggcggttcttgaataccggcaccgtgttgaggcccttcacgtcctgaccttctgcgttctgccattcgatgaagttgccgcgctcctgcacgtgcttctcggccaggatgtcctcgaagctgaggcacttctgcgccgccagcttgtgggcggtgaagtcggcctccacgtcctccacgtcgcgggccagcaggtactcctcgagcttcgactcgatgagttcggccttgggcgacgacagccacagggccgaggtgtcctccggatagtcctcggtgccccacagctcgcccagcccgatcacctcgagcaggtacttgttctggggcacgccgtagacgcacaggccgatcacgccgttgcggcacttgtactgcccgatggcgcacaggttctggttcctggcgccggcgcgcgggtactcgataccggcattgaggtaatcgatcatgtagtacgcgcccattcgcagcatggtctcgtacatggccaggtcgatggactcgcccttgccggtcttctgtgcccggaagacggctgccagcgcggaactgacgaccatcaacgagttgaagtagtcgccggtgtagggcgctgccgtcatcggctggtcgggcgtgccgttctggtagacgtagcccgcgtagtcctgcacggtgaggtcataggcagcagagttcacccgcacgggatcgcccgtgtggccgaagccggagacatgcacgatgacgagcttgggattgcgttcccacagcatctcgtcggtgatgcccttgcgtgcccaggccgggcccttcgacgactccacgaagacgtcggcgtcctcgatgatcttgaacaggatctccttgccctcgtcggagaaggggttcatcgacagggaacgctggttgcggcgctccatctccttgacataggtggtgtcgcgcaccgagtcacctgtgtgggtgttttcgatccaggtgacgtcagcaccccactccgacatgatctcgcaggccgtcggcactgcgatctccacggcggaatagatgaccttgagaccgtcgagcactccgaatgacggcttttgcgttggcaatgacatttcgttcattccttccatgtgacgctttggtcaattcacgctctggtcaagctggggccggggaatccggctcagctgcggtaatcgcgcaatgcaccacggccggcggcgaggatcatcatctcgtcggtgccaccggagacgcggtccacgcgaaggtcgcggtagaagcgctgcacgcggtgttcgccggtgacgcccacgccggccagggtctgcagcgcgttgtcgaccacgcgggccgaggcatgcgagcagtagtacttggccatggagcagtcgccgcggccgagctggtcgttgtcggccttccaggcgatctcgtagagcatgttgcgcatattggtgaggtccaccttcatgtcggcgaacttcagctggatgagctgcttgcgggcaatcgcctcgccgccctgcacgcgctggttggcgtacttggcggcgtcctcgaaggcgcagtaggcggtgccgtagttggtcagggccacctcgaagcgctccaggtcgaagtccttcacgccgcgcttgaagccattgccctcggtgccgaacaggtcctcctcgcgcagttcgacgttgtcgaagtagatgtcggcgcacgaatccatgcgcaggccgagcttgtgcaggggctccttggtgatgcccggcaggctcatgtcgacgaaccactcggtgtaggtgcccatgttgtcggcgtcgcgggccatcaccacgaggtagggcaccttcattgacgaggtgatgaaggtcttgtggccgttgaggtacaccttgccgcccttgcgggtgtaggtggtggacatgtcgtcccagctcgaccctgcgctgggctcggtcatggcgtagttgagcatctgcttgccactgccgacgaacttgaggatgtccttcttctgctcctcggtgccctcgcggatcaccgtgtcccagccgggcagctggtagagcacgtaggtggggccaccggcgcggccgagtgcctcgtaggcggcggccagcgtctgccagcccaggcccaggccgtcgtattcctcgggcagcaggatgcggtcgaagccgaggtcgcagatggccttgacccagcgctcggggtattcagagttctcgtcacactcgtggaagtacttctcccacgcctcactgttcatcagctcggtgaagccgtccaccatgagctgctggtcctcggtcaatgagaaatccattgtctttcccttttctgtggttgtttcgttggcttggctgtgtgggttgggctgacgtgccggtccgttgccgactgcgcctcccggggggccggtgggcaccctctgtgccaaccttgagtaagacacccggacagtccggatcggtgtcgtagagggcggggaggagttccccaggatgagtacgacgatgacggcgcccgctggggcggggcaggctgtaggcatggaagacgtcccggatccgcaggtgccggcgaaggcgcagcagcggacctacacggcgaggtacaaggcgaaggtcctggccgagtacgaggcgtgcgatcgggagggcaagggggcgctgctgcgccgggaggggctgtacacctcgctgatcagctcgtggcgtgaccagcgcgaccgcggcgccttggaggcgctggggcgctcgtcgggcgctgcgccggccactgctgccgagaaggaggcggcccggctgcgcagggagaacgagcggctgaccggcgagctagacacggcccggaaggtcatcgagatccagggaaaactctcggctctgttggaccagttctcgaccgacagcgcgaagaagaccgacgagcgatgatcgacgagacgatcaccgagctcacacccctgatcggtgtcaaggccgcctgcagggcggtcggcaggtcgcgggccacgcactaccgtcaccaccgcaagagcccgaccccgccgaggccaccacgacgcgagccggcccgccagccccgcgccctgagcgcggcggaggaggcccaggtgctgaccgtgctgcgctcggcgcggttcgtcgacatggccccggccgagatctacgcggtcctgcttgacgagggcgcctacctgtgctcggtctcgacgatgtaccgcctgctccgcaagcgcggcgaggtgcgcgagcggcgccgccaggccacccacccggcccgggtcaagcccgagttggtcgctaccgccccgaaccgcgtgtggtcgtgggacatcaccaagctgcacggtccggcgaagtggacctactactacctgtactccatcatcgacatctggctcttcccagatgagggtgtagcgcacgtcgcgcggcgggccggcgcgtcggtggccggatagaggtcgaggtctcccgaggatgagagctcctacacactcagcccgaaagacctcgacgcgcacgacgctaccgtcggcgggcgcgctgatgcgttcgccagccccgacctgactgccttctgccgcctcgacgaactcggcctcgttgtcaccgggcagcgactcgagccggatcgtgccgtattggcggctcttcacagatgagggtgtagctgtggtgcgacctggggcggctggtcggtgtcggggtgagggtcgaggtcttccgatgatgggagttctcacacaacccgtccggaagacctcgacgtgcctgacgctaccttcacgcgccctgacctgactaccttcacccgcctcgacggcctcggtctggaggtcaccggccagctgctcgagcctgaccggtccgtgctggcgtgccgggtcgtggagccggacgactggtgcaggcggtgcggctgccagggcgtgccccgtgacacggtgagcagggagttggcgcacgagccgttcgggtggcgccctaccacgctggtgctcaccgtgcgccgctaccgctgcaaggagtgctcgcacgtgtggcgtcaggacaccaccgctgcggcgccgccgcgggccaagatctcccgcgccggcctgcggtggggtctggtcgggatcgtcgtcggccacctgtcgatggcccgagttgccgaaggactgggcgtggcgtggaacaccgccaacgacgcggtcctggctgagggccggcgtctgctcatcgaggacccgacccgcctggacggtgtcaaggtcgtcggggtcgatgagcacgtgtggcggcacacccggcgcggtgacaagtacgtcaccgtgatcatcgacctcaccccggtccgggacggcaccgggccctcacgcctgctggacgtggtcgaaggtcggtcgaagaaggcgttcaaggactggctggccgagcgggaccaggcttggcgcgatgggatcgaggtcgtggccatggatgggttcgcgggcttcaagaccgccaccaccgaggagctgccggacgccgtcacggttatggatcccttccacgtcatccggttggccggggacgctctcgatgagtgccgccgccgagtccagcaggaactgcacggacaccgcggacgcaagggcgacccgctctacaccgcgcggcggaccctgcacaccggggctgacctgctcaccgaccgccagcacgagcgccttgacaagctcttcgctggggaccggcacgtgcaagtcgagtgcacctgggggatctaccagcgcatgatctccgcctaccgtcaccccgaccgggcagccggccgcgtcgagatgagctccgtgatcgacgccctcgccgacagtgtgcctgaggcgttggtagaactgcgcaagctcggccgcaccctaaccagacgcgcctgcgacgtcctggcctacttcgaccggccgcgcacgagcaacggacctaccgaagccgtgaacggtcgcctcgagcacctgcgtggcctggccctcggcttccgcaacctcaccaactacatcgcccgcgcactcctcgaagccggcggattcagaccacacctacaccccgaattgtgaagagccggttgtcgttgttgccgtccatgcgatcaacggtagccattccccaccgatcgaaaggtgccctgtcaggacgcggatcagcggggtccttcctcggcttcgagcatcggccgagcatggatgcatgccggcgatcgatccggggagaccatccggcccatagtcggagacggacaagtgaggaagcacatggatatcagcggacgtaccgtcctgatcgtcggaggcaccacgggaatcggacgtgccctcgcccagcgattcgttgacgcgggcagcacggtcgttgtcggcgggcgcaacatcgagcaggtcgacggcgtcgagacggtgcgcatcgacgtcaccgatgcggcgtcggtcgctcaggcgcgcgatgaggtgctggcgaagcaccccgagctcgacgtcgtcgtgacgatgtcgggggtcatgctcactgaggacctgcgcgacccggaccacatcgcccaggccgagaccacgatctcggtgaacctgctcggcacgatccgcgtgatcgatgcgttcaccccgcacctgctcggccgtggcgccggtgacatcatcaccgtttcctcgggcatcggcttcctgccgttcccgctcatggcgacgtacggcgcctcgaaggcggccgtgcactcgtacaccgaatcgctacgcgcgcacctcgctggaactggtatcgctgtgaccgagctgatcccgccggccgtcgctaacgccggccaggagaagctcaacccgaatgctctgcctatgggcgacttcctcgacgaggtcatcgggctgctcacccagaacccgactccgaaggagatcgtcgtcgagcgagccaagcccctccgctgggctgagcacgacgacacctacgaggagctcctcgccgctcggtcccagtcgctcagtaatctctccggacgctgagccggagcagcagcgtcccgggtcatccggggccgtcgcttgtggcggcgaggagcgcagtgatggcgtcgctgatcggcgtgtggatgtcgtgtctgcgcgcgagacgcgagatgacgccgttgcggataccccattcgagcggccggccggcttctcggtcggtgaggatcgacgtgctcatatcagccgggaaggcctggaagcgggccaggatggcagcgggcacgtcatcgctcagtgctgctccttccgcatgcgaaacggccaggcactctttcagatagtcgagagtgaggtccgcgaagtcagggcgggtgaacacgccggcacgccgaccggtgagcgccatgagcccggcagcggcattctggagaagcttgcgccaggcgagagtggtgaagtcgcccgcgagttcgacctggcagcgcgtgtcgcgcaggacatccgcgatgcgctccgcctccggtgatgcgggaagcgtcagccggggctcgccccgcaggaggatggtgccgtcttcctgcgactgcgccgggaaccagacgaccgcggggacgacctctactccctcaggaacatggggtcgaacggcagcgatctgctcgacgccgttctgcaacacgcagaccacggtcccgggggcgcacaaagcacgcagccagggggctgccgccgcggtctgggtggccttgaccgccaagaagagcacatccgccttctcgggctgcgcagcaggatcggtgcgcacggggccgggaacgacgatccggcggtcgccgtcgatcagggtgagctctgttcgcggcgtgcgaccgtagagcgtcggtgtgttgcctgcctcatgtaggagtgcggacaccgtcgtcccgatggctcccgggcccacgactccaacgcgcttgcgctccctgaaagaactcggttgctgctctgtcaccatgcgccaatgttacgctattacctatggcaagatcatcaagtaactccgtttctaccgccgaggatccgctgcgccgctggctcggaacggttcaggcgcggagtgcggggctggtggcaagcgaggcaaaggttgtcgacctcgtgctggaggacccgttgttcgtgggaaggagcacgacggcgcaagtcgccgagcgagcaggggtctcggcaccaagcgtgatccgtgccgcccgcgcaatcggtttctcgggcttcgctgaactgaagctggaaatcgcccgcgctcgcggaacagcggagttcttcgccccgccacacacgctcacgagcaccgattcgacgcgcacgatcatcgacacgacagcgcgcacagggatcgacgcgctcaccgccctgggcggcgcgatcgacccggacgctctcgaccaggcggtctctgcgatccgtggcgcggggcaactcctcgcctatggtgcgggcccatcggcgacggtcgcggccgatgtcgtgttccggctgcgttcgctgggcgtgcggacatcgggggtcgtcgatcacgagtccgcgatgatcgcggcacgcctgctcgaccccggcgacgtcgtcgtcgccgtcagctcgaccggtcgcaccgacatgaccgtcgcgatcgccgacgccgccgcgaccgccgacgcgaccgtcatcgccatcaccaaccagtacggcacaccactcaccgatgtctccgccgtcgcactcgtcgtgggcggcgcgccgctgacgacgcagatggccgctgccgggagccggctggcacagcttgtcgtcgtcgacgctctcgcagctgcattggcactgcgcgatcccgaccgtgtctcgcgcgcggaacgggccgggatcgacctgcccgacatcacctgatgccaccagtcaccgttgcgatcgtcctcgtcgccgcagtcgcccacgctggctggaacctcgtatcgaagtataagaaaggcgacacgctgctgttcgtgggcgcctacacgaccgcttccgcgatcctgtgtctccctctcgcgatcggtgccgccgtctccggttcgcaaccgatcacctgggccctggtcgccgctgcggccgtgtccgccgccctgcacctgacgtactcgctcaccctgcaggcgggctacgaccgagcagacctcggagtcgtctatccgatcgctcgcggcgtcgggccgctgctcaccatcgtgatcgctatcttcctgctcggagaacgccccacggcgctggcgatcatcggagcgctcgttatcctcgcaggcatcctcgtcgtcacgggcaaccccttccagagaacgggcagccgccccctccgcggcatcgcatggggtactaccaccggagccacgatcgccgcctacacgctgtgggacgcgttcgcgatcggctccatcgggctcgcacccgtcagttactacgccggcacgctcgtcgtccaggtcgtattcctggctccagccatcatcagacgccgcgcagcgttcgcgaacaccctccgcgtaaatcgcgcgcctatcgccgcggtcgcagtgctgtccccgctcgcgtacatccttgtgctgaccgcaatgcaaacctcacccgtggcactcgtcgcgccactgcgggaggcatccatcgtgatcggcgcgctcctcgcctggcgtctcttcggcgaaggacacctcgcccggcgtctgatcggcgccgtgatcgtacttgccggcattgccggcatcagcctgtagtcgcaatgccagaccaggtacgactcagcgactttctccgcgtttgatcgccttttcgccgctctcagcacccggtgctgcggcctgagctccaacgtcgcatctccagcctatgagcgtgattcgcgcgcactgccggatgtcgccgttctggttcagagtttggtagcccacggtgatcgatccgcgactggggccggtagggccgggtccacctgtgcttgatcttctcgccgagcgcctcggcgaagacgtgggatcggtagcaggcgccgttgtcggtcatcaccgcggtgacactcacgccgaggtcgcgaagaacgcgttcgcgcgttcccagaaccgggccgcggtctgtttgcgttggtcgtcgaggatctccgaataggcgaccctggagtggtcgtccacgccgtgatggaggtatcggtagccgcgtgagcccgcccccaccgaggccatcaacggacggctcgactcccccgtgcgcttcgctccaaacgggaggtacccccagcctccgcgcaaccgccctcggcttccagaacctgactcactacatcgcgaggaatctgctcaaagccggcggattcagacccacctacaccctcgttcgtgaagagccgtctatcgaggtgtggctacgtgttcaagtgcatcgatatcgagaatcgtgatgtttcgacgcccgtgcaattcgatgaggccggagaccgagagcgcggcgaggcgccgactcagggtttccggcgtcgtgccgaggtacgcggcgatttcctgtttcgccatcggcagtctcaccgtggccgccccgtcccggacggtgccgggtagctccagtaggtaggccgcgacgcgggcattgacatcgctggaggtgacggccgccagtagtcgctcgacggacgagagccggtcggcgagcgtgcgcagcatccgctgactgatgtcggggtagtcacgcagcaggactgcaaggtcggcatggtcgaacacacatatcctgctctcttccagcgcgacggcgaggtcgttcgggcggtgacccgtcaggaaggcccgttcacccacaacatcgccgtcggtcaccgttcgcaggatctgttcctggccattggcggccacgtagctgaccttgagctgtccgctgtgcatcaccagcaggcgcgacaccggctgtccgggcgcatagacgacctcccccctcttggcgagtaccgggcgggcgaagtccgcgacgcgcaactgctcttcatgggtgagaccttgaaagatcgggacgcgggtgacgcacaagtcgtcctcgggcatgacgcaagcctatcttgctccggctcgacgcgaccgtaacggacggggcagcggcgctctaagcctcgcgaacttgatccatgtcaaggagttcgcggcacggtcaatctacggtgaaggtgtcagtaagaaacaccacgacggaaggattccacaatgaccaccgcgaccacaacccacaccatcctccgcgcggaaggtttttcctgcccctcctgcgtgaccaagatcgagaagcaggtcggccgtctcaagggtgtcgaaaacgtgaaggtccacttcgcctccgcccgcatcgagatcgaccacgacgccgagcgcgtgtcggtggaagacctagtcgccgcagtcgtgaaggccggctacaaggccacacccgcggccttctaacgtcagcgggccagcgggacctgccacattttccccttcattctgccggtccgccggctcaagacgtagaaaggtcgtacccggaagtgaacaggctccagaaatgggtctatgggaactggtccgttcccgtcgtgtccggtgtgctcatcatcatctcgttcgctgtccagtggctcggcgggggtgtcgccaacctcaccgtcggcccgcagtggtggctgaacgccggcacccacgccacgcatgccaacgcggtcttcaccctcggggatgccttcatgatcgccgcggccgtggtcgccggctacggaatcgtagtcaaggcggttcgcacgctgatcgccagggtcatcggcatcgacctgctggtgtcggtcgcgaccatcggctctgtcatcatcggcaacttctgggaggccgcggcggtcacgttcctgttcgccatcgggcacgccctggaagcagccaccttgaacaagacgcgctcggcactggccgagctggtcgctatcgccccagattccgcgaccatcgtgcgcgacggtcagcaacaggaggtccctgccgcccaggtgagagtgggcgagatggtgctggtcaagaacggcgcgaaggtccccgtcgacggccaggtcgtctcgggcaccggcgtcatcgatgaggcctcgatcaccggcgaatccatcccggtggaaaaatccaagggcggacaggtcttcgccggcaccgtctcccgcggcggttttctgcaggtcctggccatgggcatcggtgccgacacgaccctggcccggatcattcaccgggtcgaggaggcccaggacgccaaggcgaagacccaggcgttcatcgaccgcttctccggttggtacacccctgcgatgatggtgctggccctggcggccggcctgatctccggcgacgtagtgctggctctgaccctgttggtcatcggctgccccggcgccctggtgatctccatcccggtcgcgatcgtggccggtatcggccgcgccgccagcaacggcatcctgatcaagggcggcgaattcctggagacctcggcgaagatctccgcagtcgccgtggacaagaccggcaccctgaccgagggatgtcctgagctgaccgatgttgtcatcctggattccgcactggagcgcagcgaagtgctgcgctgggctgccgccgcggaggccggctccgaacacccgctggcccgtcccatcctggacactgcccaggccgagggagtgggcccgcacggcgtccccggcagtgtcacgccggtccccggcaagggcatcgtctctgacgtcgacggtcgtcgggtgctgatcggcaacccgccgctgctgctcaagtacggcgttgtcgatgacggcagcgccgcccaggccgcggaatcgctggccgctgacggcaagacgccgatgatcgtggccgtcgatgacaaggtgatcggtgtagtcgccgtggccgatcagattcgacaagatgcgcccgagatgatcgcccgcttgcaccgggccggcgtggagaaagtggtcatgctcaccggtgacacccggctggtggctgagaccatcgggaaggcgaccgggatcgatgagatccactcctccctgcttcccgaggacaagctggagatggtcgcgcagctgcagcaagagggctacaccatcgccatggtcggcgacggcgtcaacgacgcccccgccctggccaccgcggacatcggggtggcgatgggggcggccggctcggctgtggccgtggagaccgcggacatcgccctgatgggcgacaacctccttaagctgccggaagctatcggcttggcgaagcggaccgtgtccgtgatgcggcagaacatcgcgatcgccttaatcaccgtaatgctgctgctggccggcgtcttcgccggcggggtgaccatgtcgatcggcatgctcgttcacgaagcctccgtactggtggtcattgccaacgcgatgcggctgctgcgcaacagcccgggctccaccgcgatgccgaagagcgatgtgtgatgggcttcgaactcggcgggcgtctggtagccgaccgctgagttgaggcgcttcgtgtcgggggcaccacccgcttgcgggggagaaaaaccgtggatccaggcctccaccgcctcgatggccccggcgggggtgccccattcgcggcggttgtagaactcacttgtgaggacgagtcattgggattcagtcattgcattgacccactcccccgcgcgctgcgctccaagcgggaggtgcccccaacacgccggtacgtcccatggactgatccagttcgagttcctggcagcaccgattcacctccgacctgatttcgttcactcatcggtatctacgcctgcgtaagtgcttctggccttcgggtttgcggtcgtcgggtgttgattctggtcgctacgtattcagggttggggcccggtagtctgaccaagtgagccgattcgtagtgcggggacgctctgcgtcggggcggtgacagttcaggtcgtcgagaagcaagggtcctaggtcgtgtctcgcatgcacgtgggttcagcgcatacccctctgtgccaaccttgagtaagacacccggacagtccggatcggtgtcgtagagggcggggaggagttccccaggatgagtacgacgatgacggcgcccgctggggcggggcaggctgtaggcatggaagacgtcccggatccgcaggtgccggcgaaggcgcagcagcggacctacacggcgaggtacaaggcgaaggtcctggccgagtacgaggcgtgcgatcgggagggcaagggggcgctgctgcgccgggaggggctgtacacctcgctgatcagctcgtggcgtgaccagcgcgaccgcggcgccttggaggcgctggggcgctcgtcgggcgctgcgccggccactgctgccgagaaggaggcggcccggctgcgcagggagaacgagcggctgaccggcgagctagctgtacttccccgggaggttatgaacgggtgaggtagcgaagacctccgggcaggatgtgggttaccacactcactctcctgaccacggaggtcttcgtgactcacgctaacgcacccttgacaccggaagggcgtcgtcgtcttgctgttctcgtcgtggaacagggctggtcgttgcggcgggcggcggaacggttccagtgctcgcccgcgacggtgaagcggtgggccgacaggtaccgggcagggctgccggttcgccgcccgaagccgacacggtacgaggtcgccgcgccgggccagctcgtgcacgtagatatcaagaaacaaggccggatccccgacggcggcgggtggcgtgcccacggtcgcggatccatgcaggaccgtcacgcgggagtggcccgcgacaaggcagcccgtgccggggcagccggctctcgcggctaccggtatctgcaccacgccgtggacgaccactcccggatcgcgtactcagagatccttgacgacgagcgcaaagagaccgcagcggggttctggacccgcgcgaacgcgttcttcgcaggcctgggcgtcacagtcaccgcggtgatgaccgacaacggttcctgctaccggtcaggcgccttcgctgacgcgctcggcgacgaggtgaagcacaagtggacccggccataccggccgcagaccaacggcaaggtcgagcggttcaaccgaaccctcgccgtcgagtggacctacgcgaagccctacgccagcgaagccgagcgcgccgcagcctacgagacctggctccatcactacaatcaccacagaccccacaccgggatcggcggccagactccctcagcccgcgttcacaacgtcacggggaagtacagctagcgcggcatcgaggtcatcaaagcgaagctgggcaattcgtgcgaacagtacgtcgacgacagcgagctgggccatgcgggaggcgagcgcaccgatgcgcagctcatcttcccgcgcggtggtggtcaggacgtgactgaccacctggccgatgggggaatcgggatttccggtgatggcaacgctcagagccccggcgttggcggccaacgcgagggccttgtgagtctccacggtccgtccggagaaagagatgccgatgacaacgtcctgcggggtccgcatagccgcctgcaccagctggaggtgtgtgtccgaggtgaactggcactgttgtccgatgcgctgcagcttctgacagaggtcctcggccaccagtccagacgcccccacgcctagcaccgtgacagggcgccgcgcggcgatggcgtgggcaacctcgtcgaggcaggtgaggtcgagaccgctgacggtgtcctcgatggagcgtgcttcatggaaaccaatcttgtgagccaggtcatgcaaggagtccgaggcgtcgatacgaccccttgcgacaccggagagctcatgctccacgtcgaggcgcgtgagctctcgcgccagggaaagacgcagggccggaagcccctcataccccaaggagcgcgcaaatcgcacgacgctggcctggctcacaccggctgcctttgcgagctcggccgtcgtggcggagacgacggcagacgggtcggacaggagatggtcagcaaccgcggtctccatggccgagaaggagggacgagccctccggatgcgctccacgaggagggtcgaattgggcgaggtgtcgcggtcggcaggctgggacgagacgtcatcgagacgggatgggacggtcgaatcgggcgcgacctcgcggggtgcggtcatctcgctgagctccttgaacggtagccagcccctcatcagggctcgtattgaaattctattccatagatggctatctcgatgtaatgtcgtgtcacgatcgtggcgacgaagccactcgtgacggaagggaacaccggtgtcgcctcaggagtccacacaccaggtcagcaccaccgagcagcgcaataccgcctccagcgacctcgaccgcatgtcctccctcgaggtggtgcaggtgatgaacgccgaggaccacaaagtggccgatgcggtcgccacggcactcccccccagatagccgaggcggtcgatgtcgtggtggccggggacggaacggacaggagcagcggtgagcatcccgaagcaccaccagggcctggaggtcctgcacgagaacacgctggccgcccatgcctacttcgtgccggcctcagcggcagtgaccgatgtcgtcaccgcccgtgagtcgtccgaccgggtccaactgctcaacggtcagtgggacttccgctaccaccactcggtcaacgacctggacgaggccttcatggaccccgggtgcacggtcgagggtttcgctccaatcaccgttccgggtacttggcagcatcagggctacgacgctcaccagtacaccaacgtgcgctacccgatcccgctggacccgccccacgtccccgtggacaacccctgcggcgcctaccggaccaccttcgatcaccacgccgacgcggcggcgcccgacacgacgctggtcttcgagggcgtcgactcctgcttctacgtgtgggtgaacgggcactacgtcggttacagccaggtcagccacgccacgagcgagttcgatatcaccgaggcgctcgtggagggcaccaaccacatggcggtgttggtgttcaagtggtgtgacggcacctacctcgaggaccaggacaagttccgcaccagcggcatcttccgcgacgtttacctcgtcgaccgccctacccgtcacctgttcgactacttcaccactacccagatccacgaggccggcgccacggtgcgcctgcgtgcctcctacgtgggtggcccggtcgagacccgggccacgctgctcggcgcagatggcacgacggtggccagcggtgtgctggccgaggccaacgacgcccgcgggtacagccacgccgtcgaactccacgtcaaccggccacgcctgtggaaccccgagcacccggagctgtacaccctgttgctggagatgccagacgaggtcgtcaccgaccaggtgggtctgcgagaggtctcgatcgacgacgtggtcctgcgcctcaacgactgcccggtgacgttgaggggcgtcaaccgccatgactccgcccccgccaccggacccaccgtcgacgtcgcccacatgcgccgcgacctggaactcatggtgcggcacaacatcaacgccgtgcgcagctcccattaccccaacgacccccgcttctaccagttgtgcgaccagtacggcctgctggtcatgtcggaggccgacaacgagagccacggaacgcaggcccagttcctggccgacgagtcctgggacaacgtcgtcgagcactggaacgagctgatcgccgacagtcccgactggacggaggcgaccctggaccgcgtgcagcgttgcgtccagcgcgagaagaaccggccgagcatcttctcttggtcggccggcaacgagtgcgcctatggctgcaccctcgaggtctccctggcctggatgaaggagttcgacccggaccgggtgacccactacgagagcgccttctaccgcgattccaagcgcagctatgactactcgaacatcgacctgtacagccgcatgtacccgtcacagcaggagatgctcgactacctcgcaggcgatccagacaagccgctggtgctggtggagtactgccacgcaatgggcaacgggcccggtgacctggaggactactggcagctcatccacaccgaccctcgcctgtgcggcgggttcgtgtgggagtggtgcgaccacgccgtcctagccggccacaccgacgacggccgcccctgctacctgtacggcggcgactccggtgaagtcatccacgacgggaacttctgcgtcgacggcctcgtgtggcccgaccgccgaccccaccccggccttttggaactgaagaacgtgcagcgcccagcccgagtcgtcgcgcacgaccccggcgcgggcatgctgacgctgcgcaacgacctggacttcacaaatctcgacgaggtggtcgacctgtcctgggagctggtctgcgacgggatcgtcctagatcgtggcgacctgtccttcacgcgtcctgttccgccccacaccgaaacccaagtgacctgccgcccccagctgccgcgggtagggcgctgtcacctgcgtgtgacgcaacgcctccgcgtcggcgacgcggtgcgcgccgcgggccaggagctcggcttcgatgaggtcgccgtccctgtcgccgacccccgcaaccagcagtccgtgcagttgctcgaggcaccgcccggtgccgtctcccccgccgtcgagcaggacccctccgcgatcacggtgcgtggtgacggcttccagtaccgtttcgacaccggcaccgggatgcccacgtcgatgctcgtgggcgaccaggagatgttcacggcacctgcggaggtcaacatctggcgcgcgcccaccgacaacgaccgacgcatccgcctggagtgggaacgggcccgctacccgtatgccgcggtccgcgcacatgagtgttccgcccagacccttgacgggtccgtggtggtgcgcgcccgcatgaccctggacgccgcgacgatccagcccatcctgcgcctcgacgccagctggaccatcgacgtcgcgggccgattgcggtgccagatggacgtcacccgcacaccggagttcccaaccctgccccgactgggtctgcgcttcttcctggcaccggaactcgaccaggcgtcgtgggtcgggctcggtccgggcgagaactacccagacaagcggcaggccagccgccacggccacttcaccagcagcatcgacggactgttcgtcgactacctccgcccccaggagaacggcagccgcggagactgcgactgggtccgtgtggagcaagccgatgcggcgcgtggcctgaccgtcacctcaccgcgaccgttctcgttcaacgcctcccggatcacccaagagcagctgtcgattacgagacacgacgtcgagctggaccccgacgaccaggtggtgctgtgcatcgaccacgccatggccgggatcggctccaacagctgcggccccgagctgctcgcccgctaccgggtcgacgacgagacgtaccacgtcgacctcgtcctcgcccccacccgccgctgaacccaccgggagacccgaaaccatgcccacacacgctgcaagttctggcaagacgtacctgacctggggcaacaagatcggctacggctccggtgacatcgccggcaacgtggtctacacgttcctgtcggccttcctgatgatctacctgaccgaccagatgggcctcaacgccggtgtcatcggcacgctcatgatggtctcccagctgttcaatggtgtcaccgacatcggtttcggggccttgctcgaccgcacccatacccgaatgggcaaggctcggccgtggatgctgtggccctacatcggctgcgctgtcaccctggtcgccagcttcgccatccccggcgggctcagtgagacgggcaagtacatctggttcttcctcgcctataccctgctcaactcggtgttcttcaccgcgaacaacatcgcctactcggcgctgacggcgctgatcaccaggaactccgccgaacgagtgcagatgggctccatccgcttcatgttcgcgttcaccaccagcatgctcatccagaccttcaccgtccagggcgtgcgcatgctgggtggcggcgccgacgggtggcgggccatcgcgatcatctatgccgtcatcggtctggcggttaacacgatctcggtgctgtcagtcaaggagctgccgcccgaagagcttgacgagggccacgatccggccgccgccgagcgctactcgttcaaggagggcgcccggagcctgctcgccaacaagttctatctgatcatcctggtcatctacctggtccagcagatcttcaccgccaccctgaacatgggcatctacttcatgacctacgtcctcggtgacgcgacccgtctgggcaccttcgcatgggcgatcaacattccgctgatcatcggactgctgttcacccccgttctggtcaagcgctacggacagatgtaccgcctcaacatctggggttacgtcgtcgccgtcctgggccgcttgggtgtcgtggccggtggctacatgggcagcatccccctcatgatcgcctcctccgcgatcgcctctctgggcatgagccccctgcaaggcactctcaatgcgctgatcgccgaggcctccgagtacaccttcctgcgcaccggcaagcacatcgacggcatgatgttctcctgcaccaccctcggtgtgaagatcggcggcggcgtcggaacagccttggccggatggctcttggccgccagcggctacgtcggcaacgccaccacccagagcagctccgcgatccacatgctctacttcatgtacctgtggatccccgccatcgccaacctcatcatcctcgccttcctcacccggctcgacgtcgagaaggccaaccgggcgctgcgcacgtcggcagaccgcgtgaccgcgtgagcaccagcaccctcttcgagcatccccagagacacaggagaagacatgtcgtggttggtcaccggcggagccggctacatcgggtcgcacgtcgtgcgggccttcatcgagcagggcatcaccccgatcgtggtcgacgacctgtccagcggccaccgggaattcgtgcccgacggcgtcgacttcgtcgaaggccaggtgcaggacacctcgctgctggagcggacgatgcgtgagcacgacgtcgagggcgtgatgcacatcgctgggtacaagtacgccggcgtgtcggtcgcccggccgctgcacacctacagccagaacgtgcagggcaccgcggcggtgctggaggcgatgcagcgcgtcggcgtcagccgaatcgtgttctccagctcggcggccgtctacggcacccccgacgtcgacctggtcaccgaggaccagcccaccgcccccgagtcgccctacggccagagcaagctgatcggcgagtggctgctggccgaccaggcccgcgcgctggagctcaccgacggtgccacgccgctgcagcacgtcagcctgcgctacttcaacgtcgtcggctccggcaccgacgaggtctacgacaccagcccgcacaacctgttcccgctggtcatcgaggcgctcatcgagggccgcacgccccgcatcaacggcaccgactacccgacgccggacggcacctgcgtgcgcgactacgtccacgtcgccgacttggccaccagccacgtcgccgccgcgacggcgatggccgaggggcgcgagctgcggccggtgtacaacctgggcagcggcgacgggctctcggtgcgcgagatcatggacgcgatgcagcgtggcaccggccacaccttcgagccggtgatcggcgagcgccgccccggcgacccggcgcgcatcgtcgccaacggggacgccgccgcccgcgacctggactggcggatgcgccactccatcgacgacatggtcacctcggcgtggcaggcgcgcaccgcccatcccgacataagcgagtgagacccgctgaccacggcacctgcctcatcgggacacgacacgcctcaccccacccgcgatgtcgaccacccgaacccgcacccagttgaccaggagaagtactcagtggcagacgttttccaaccaccgggtaccttaatcggctcatcacagatgagggtgtagctggggcggtggccaggtaggggccgaggtctcccgatgatgggggttcctacaccttccatccagaagacctcgacttgtctgacgctaccttcgcttgccccgacctgaccaagttctgtcggctcgacgacctcgggctcgtcgtcaccgggcaacggatcgagcccgaccgtgccgttctcgcgtgccgggtcgtcgacgacgaccgctggtgccgcggctgcggctgtgaaggcagcccgcgcgactcggtcacgcgcgagctcgcccacgccccgcagggctggcggccgacgaccttggtcgtgacggtccgtcggtaccggtgcaccggctgcacccgcgtgtggcgccaagacaccagcgcggcggccgaaccgcgggccaagctgtcccgtgctgggctgcggtgggcgctggaagggatcgtggtccagcacctcaccgtcgcccgggtcgccgaaggactcggcgtcgcctggaacaccgccaacgacgcggtcctggccgaaggcaagcggctgctgatcaacgacccggcccgattcgacggcgtcaaggtcatcggagtcgacgaactcgtgtggcgccacacccgccgcggcgacaagtacgtcaccgtgatcatcgacctcacccctgtccgtgacggcactggccccgcccggctgctcgacatggtcgagggccgctccaagcaggcgttcaagtcctggctcgccgaccggccgcagtcgtggcgcgacgccgtgcaggtcgtcgcgatggacgggttcaccggcttcaagaccgccgcggtcgaggagttgcccgacgtggtcaccgtgatggaccccttccacgtcaccaggctcgcgggcgaggcactggacgtgtgccgccgtcgggtccaacaagccatccacgggcaccgcgggatgaagggcgacccgctctactcggcgcgacgcacgctgtgcaccggcgccgacctgctcacagacaagcaggcaacccgactcaggtccttgttcgccgacgacaaccacgtcgaggtcgaggcgacctggggcgtctaccagaggatgatcgctgcctaccggcacgaggaccgaagccgtggccgtgagctgatggccaagttgatcgacgacctcagcgccggcgtgccgacggtcctggtcgagatcaccaagctcggcagaaccctgaagaagcgcgccgacgacgtactggcctacttcgaccggcccggcaccagcaacggcccaacggaggcgatcaacggcaggctcgagcacctgcgcggctccgcgctcgggttccgcaacctgaccagctacatcgccagatcgctgctcgagaccggagggttcaggccgcaactacaccctcgattgtgaagagccggcgaaccggcagcccggtggcctggtcgatgttgatcagcttcggcatcttgtatcgggcgagcacccgaccgaccgtggaacggtgcaaccgcaggtgatacgcgatccggtgcggaccccaccggcgagtgaaccgcaacgcgacgatccgatgctccgtcttacgcgaaagccggttcggtgacgaggtgggcctcgaactacggtcgatcaacggcagccctgcccggtacctgtcggcccaccgcttcaccgtcgcgggcgagcactggaaccgttccgccgcccgccgcaacgaccagccctgttccacgacgagaacagcaagacgacgacgcccttccggtgtcaagggtgcgttagcgtgagtcacgaagacctccgtggtcaggagagtgagtgtggtaacccacatcctgcccggaggtcttcgctacctcacccgttcacaacctcccggggaagtacagctagatgacgagccgcggttcccagttcggcgatcgtgggaagtcatcgtcggagcgccaacccgttgagtcattccacgggaacgtgccaggcgtggcggggtcgtcccatcgccacacatcgggatggcgtcgctcgctgctggtgcttggacgtgctgcatagccgagggtctggccggctgggattgtgtagtgccagcgccaaccggtctgatcctcgtcaagcgtgaacgcttccgggtcgaggccgtgtttgtgggcgaccgcggccagttgccgccgcgcgttgaacggggccgggttcagcagaacggcgttgaggtactcggtgtcgaagtcgtaggcgaagttcagcagctcgggcacctggcggtcgtccacaagtcgcccaagctcatcgagttcggtagagccgacaaccccgtcctcgtattgtcgtcggagttgggcgccagcgttgtcggcgatcttggggaggtattcggcgagggcggcgaccaggacgatggtcttggtggagttcacgcgggtcgcgtagccgaggtcacggccgtggagcacgccgtgtcgagacactttgccgtagtcgccggttggccttacgtcttcggagaagagggcgcgcactaccgggaggttggtttccatgccagcgatcgtctcgtcatccagatacgggtcgttgctccctttcgagaagaaggactgcccggtgaggtcccgactcatgccatcgatctgagccaggatgatcggggtcgatgcctcgtaggcgcctgcgaagtgatgctcgatggccttctcgatgaaactcactcgatcccagacgagctgcttgaacgggtagtgagagttcgaccatcggcgcatcggtgcggcggcgtgtttcagcaacgtcgcattctcgttgttccacacatcggtgatcgcctcatccagctcgtcgtccgtggcaccgttcccggcttgtctgaggacgcgcaaggtgccttccatgtgccagcgtccgcacatggcccaccccaacggagcgaagagcgccacggcttcggccagttggtcgagagtgggatgactgaccaggccgaggcgtcgcgcgacctcgcgcgcttgctctgactgcgccaccttcccacctcgtctctcagcgatcgaatgctctacttcaaggatcgcagacacgaccgacagcgtttagagacgaggaccgcgagtcacggcatgcgtcaccgggtgcccggtctccggcgacggtgcgccggcgttgagttccctccgtgcggcttcggcgcgggcgcggtcgattttctgccgggtgatctgcggcggctggagcttgcccttggcggccactgatccgaagaggcgcggtcgattttctgccgggtgttctgcggcggtggcccgagtggggtttggtcgtcggtgacctggtaacggtcccgatacgccgccacgacgacggcggcgcgacgccatgcctttccttggttcaggtctttcggttcggggccaagctgtgccgtccagagtgccttgtcggcgagcgcgccggcgagtacggcctcggcgcgggcttcgatcagttcgtggcgttcatccagagcttggcgcatgtcgtcggccatcggcccctccgcgtatgggaggagcccggcgatgagccgaggcggtttgcgggtgcgaccggacccggcgggccgggtggtggcccgggcgatacgggcgtggatcaccgaagcgatgtcatcggcatcgtcaagcccgcgggcggcgatcaggcgcggcggcagggtatcgaggttgtggtggttggcttcggcgtgccggagctcggccgagagcgctgggtaggcgtcggagtcgagcacggcatcgacctgctcgacggtgagcccggcaaccgcaaagaggccggcccagcggtcgtgttgggcggcttgggcgatggtttcgtattcggcggcgagctggccgatgttgctccaccgctcctgttcggcagtgatcgcctcgtgcgctgacagttcggcgccgatgtgctggatcacgccgtagagcaccgaccgtgcggtggcgtcggggttgtcgctggggtgcggcaccccgtggctgtcgtcgggccggtccaggacgacataggcatagttgccatcggcgccgcgggtcatggcgacgtagaagttctcccgtgtggtggttgcggtggcgatgacgtgcgcggtgtcggtcgtcacgccctgggcacggtgcgcggtgatggcgtagccgaggtgccccaaacgcactcacctgtgatcgcgcgcgtgtgcgcgtttccacggtagccgagacttgggacatgacccaagcacgatgctcgacttcctggtgcagagtgaacggacgagaactcgtagttcttcgacgatctcctggctggtcagtaggtcatccacccgacccaggcggtcgttgaagggccgcgagcgggctccgtcgacaccggttccgaggcaacccggtgggtaccatccaggggcacggactctattgccccgcctccgtcgcatctcgccgctatcatgaaagcctagggtggtaccgagccctagtactaggagtgttgcgatgcgcgtcgagtctgccaccgtcagtaactttcgctgcgtgattgacagtggtcagttcgacgtagagcccgacaagacgatcctcgtcggaattaacgaagcggggaagaccgccctgctgaaggctctacagcacgctagccccactgatgacactgcaaccatcgactggctcttcgacgcgccagcgtcgatggttgacgacatccgtcggaagaaccttgacccggcaacgctggctgtagcccgcgtcgtcatgcgaccggagccgaaggacctaaccggtctgagcctgccagaaggttccgatgacgtccggctcatcatgaccgcctggatgaacgggaaacggacctacacggtgacggggattccctcggcaccgaccgtgggtgatgccgagaaggcgatcctccgcctcaccggcgcgatgaacaagcaatccgacgaggaggcgaaacaagccgccaaggcaatgctggattggaaagacgcacaagcctcagatgctgcgatcagtggcgaagtggccgccaagctgaagacgcacctcgatgccgccttgccgttgttcgcagagggatctgctgccgaaacccactgggatgcattgagcgacacgctcaagagtgctcttacactcgacaagatcggcaagcacttagcgggacgcatgcctcctttcgtctactactcctcgtacttcgcggtccgcccgcgcattcacctcaatcgattggccgaacgcgaagcgtccggagagatcgacctagaatacgacttcggaaacctgcaactactcaagttcctcggattcaccgccaaggaactctccgacatggcgtccgaagcacccgagaaagggcgcaactacgacaacgacgtcaacgtccagaatcagtacaagaaggaactggccgcacacgaacgtcgcgtcactgagcgaaagcgggcactccaaactgcgggagcgcggctcacagaggagatacagagagtctggaatgacgacaagctgaccatacgtctggacgtagacggccaataccttcagactttggtcgaagacgagctcggtattcccgtcgagttggaccagcggagcgaaggtttccgttggctagtctcattcttcgtcgtcttccatgcgcaagccaaggacgatctgaaggacgcgatcctccttctggacgagcccggcctgagtctccacgccttgaaacagcaggagttccgcaagaccgtctcgcggctcgcggagggtaaccagattctctacacgacccactctcccttcatggtcggctcggacgaactcgacctggttcgcatagtcgaaatgaccgatcggaagacaggaacgaaagtccacactcgcctcgcggtcgatgatccgaagtcgatctaccccctccaggcagcactgggctacgaccttgcgcagagcatgttcacgcaccagaaaaatctggtggtcgaaggcgtgacagacctgctctatatcgaggcgctgaactcggcatttgctgggcaaggtggcgccacgctggacgacggaattgcgcttgtgcctgctggtagtgccagcaaggtcgtctactacagcacgattctcaccagccaagacttaaaagttgctgcgttgctggactcggacgccgcgggcaacaaggcggtggaacaggaagcgctctggcaacttcttaccagtaagcgaatcctccgaaccggcgaccacgtcaccggggttcaacgagccgagatcgaggacctgcttcgtgtgagcctcggtctcgtcgcacgagacgagtgcggatgggacagtgtttctaccattgcagcacaaccggagcggccgatcatggagattctggatgccgaacacgccgaagtgtcgaagtggaagcttgcccgtgctttcgttcgatgggtcgccaatagcggcactcacgccttgacagacgatgaacagaagtcctgggtgtcgctcacgacagccgcaaacaaggcgctcgcgtagcttgaaatgctgcaattagttatctgctgagggatggtgagttcagcgaggcggtggaaccataacatccattatcatcggctgattctcgatgctgtgcccgccggttcccggactgcattggatgtggggtgcggcaatggtctgctctcggtagaactgcgagaggcagtgccggaggtgacgggcatcgacctcgatcagacggtgctggaagacgcacgacaacacagcgacgagatcacctgggttcgcggcgacgccatgacatgcgactttggcaagactttcgatgtcgttgcctctgtcgccacgttgcatcacctgcccgacttggacacggcgctatcgcggctggctgatctgacctcgcccggcggcgtgctcgccgtggtcggagtggcacgcacaagccgccccaaggacgtactcctgcacctggctggggcggtgcagcataggtagatggcccggaagcacgagttctgggaacacaaggccccgacgatctggccgccgccgcacgattacgtgaccgtgcgccgaacagctgagcgagtgctgccggggggtgcagtggaagcaactgctgctgtggcggtacgcgctgatctggcgcaagccgcgctgatctcatattcagaggccgcgcgctggcccgtctcggcttgggtcagagcggcgggggtcgcgttcgaacgagtcgtggagttgtcgtttccgctgcgccgcgtgttcccgcgcctgctcttgtacggcccgcttcacttcgatacgtcgtgctgcgtcgctgacggggagggcgcggagttcatcggcctctgagcgtaggagcgcggcccggttcctggcgtcgtgcgcttgacggtcagggttggtggtgcgacgcatcccgtaccgggctgcctggacgtgctcagccccgtactcgctgacgagcaacgccgtgcgctcctgccggtgccgcttccgcatcgtctcacggtcggcagtggccacgtcgacggtctctacgacctcggtcacgcgagggtcagtctcggcgcagttcgcggcgaccttgcctgcccattccgggagacgatcggggttcgcgggtgtggtgccccactcctgactgaccttcccgcgcagcgtctgggagcgttcggtcgcggcctgctgctctgtacgggccttgcgtctgccgaaccttcccacggtggcgaggcggccacgggcggcagcctcctccgcgacggcaccgaggtaggcggccccatcagcctcggcctgcacggtcaatcgctgggcgacctcggcacgcacccgctcggcggcggcctcggccaggcggagcaccttagcggactcctcggcctcggctcgatgcgcagcacgttgagcgtcgaaccgcgcggcgatccgctcccaccgctcggctgctcgttcggcccgctcggcctcgcggtcgaggcgggcgagttcttcggtgacccgccgtacgaggctgtctgcaacgaatcctcgcaccgcctctctcgcggttcgggtggcgtggtcgaggccacggtccgcggggtcgcgttccatcgcctcaataaactgcgcacgcgcatccgccagactctcggcgatgacgtggagccggttcgtttcgcggcctcgggtcatgccgacatagacgcctgccgcgctcgccgcctcccggaccgcacactcgggaaaccagagatgcaggccgtcatggacgtcctccgcacggctatccccgaaggcctcgacgaacaggcccgcctcggtcgagctctgcgtcggcgagccagcgacgtgctggcattcttcgacctacccggcgccagcaacggccccaccgaggccaccaacggcaggctcaaacacccccacggatccgccctcggcttccaagatctaacgcactgcatcgcccgatccctgctcggggcgggtggcttcagaccccgcctacaccctggaatgcgatgagccagcttcctggcgatgctggcactgacccggttacgtcgcgaccccgtggtcccggccgacgatggtcggccctccgacgaggcggctcggcctgccgggggtcgtcagtggtgggccgatgccgggctggcctcctgcatgacggcgtactacgtcttcgcgacgaccggtttcgcgctgggtccggtggcgctgacctccctcatcatcgcgctgaccccggccatcacgatgggttggcagctggtctccagcaggcaggtcgccggccgcgatgtcctcgggttcgcggtggcgatcgtcggcgtctgctgctacctggtgccgctgctgtcgggtcaccagcagttcccccggcacgccatcgtcatcgcggcagtggccgccgggttggctgccctggtgcgggcgttgttcaccatcgtgctgtggaatcgggcgcttcgacgcgtcccgctgcatgctcctcgggtgaaccggttgaccttcctcatcggagcggtgctgctgcttcccgtcgtgctgatcccgggagcggggggcggggccgcctggcatcacctcggatagctggtggctctggtggtggtcgcgaccctggtgcccaatatgctcaacacctgggcctcctcgcgactgcaccccactctcaacgcgatcgtcgggatgctcaccccgccgttgaccggcgtcctggggtggttgtggctgggggagagcctcgccggactccagtggttcgggatgatcctgaccctggtgggaatcggggtcagcgtgctgcgacccgctcccgcgcggacgggtcgggaccgctgaccggatgctcgcgccggctgggacgcgggccccgggagtccgccgcaggctgactccggagctgggtggcgcctccggcgacactcagcgtgagaggtcgtcccgctcctggacggtgtagccggccgacctcgccgtcgcgtccgtcctccgtgcccggcgcagcccggcgaccttctccgaggttgccgccatcacgtcgcgagcccgcccgcggccgtagctcaccgagtagtcgctcgcgaccccgatggatgccccgacctcgacggcatcctggtcggcgcccatgtacatgaactgccagtggtagtcgttggtctgctgctcgaccagggccttgaccgccggatgggtccactcccgcgaggcattctcgatcccgtcggtcatcacggcgacgacgacggtgccggggcgctggtcctcgggcagcttggccagggcgaccccggcatcggtgatcagccgacccatcgcgtcgagcagagccgtggtgcctcggggtgccaggtccagcgggggcacctccgcgatcggccggtcggcgtagaccagctcgtagcggtcgtcgaactgcgccagggtgacgcggcactcgccctccgaggtggtgcgctgctgctcgatgaaggccgcgaagccgccctcggtgtcggacttgatcgactgcatcgacccggagcggtccagcaggaagtagatgtgggtgaggtctgaacgggtcatgacgttctccttctgggtgtgaagcgcatgggcctgggtgggatggccggggtccgtcgggtgccggtctcacggtcgtatcgagctctctcgacacctgctgcggtgactctgccctgggctgtggcgtagccggcaagtgcttcggtgtgcgccagccgggggccgacggcgttctcgctgagaccagcctgcgcaccggcggcgcgcaagctggtgccatcggtgatcaccgcctccgcgagcgagtcgtcgatgagttcggcgagccggtcggcggcctcgcgcagcagcggcagggcgtcggagatgcgtcccgccccggcggcctgcgcctggctgagggcttcgcggatcgctgtgagggcggcgtcatcgagtggcatgacctgacagtaccgcagaaactgcggatacgcaataagtacggatgcgcaggatctgtggtcggctgccacggcgcggggtctcggcgatctgcgcctgcgcgaggggatgggctggtactcgctccggataggatcggccgatggccatccatttctatacggcatcgtcgctcgacgggttccttgccacccccgacgattcgctggagtggctcttccggcaggatttcgacatggacgggccaatggcctatccccgcttcatcgagggtatcggtgcgctggtcatgggcagctccagctaccggtggctcctggcccatcaggacggctgggagtactcgcaacccgcctgggtcttcagccaccaggagctgtccgcccccgagggtgccgacattcgcttcgcccgcggcgatgtcgccgaggtggccccgcagatccttgccgccgcggggcagaaggacgtctgggtgatgggtggcggggatctcgcgggccagttcgccgatgccggcctcctcgatgaggtctgggtgcaattcgcaccggtcaccctgggggccggccggccgctgttgccgcgggatctccagctcgaactggtcgatgtcgcccgcaaccgcgacttcgtctgcacgagattcagagtggtgcagacccgctgaccgagcaggtgcctcgggtcaccccgaggacgccgacctgtcgacccggatctcctcgagacgacggtgcggcgtcatcgtctcgagtgcggcgatcgctgccggtcggtcggctcagcgcgccgagccgaccgcctcggcggggatgtcctcaggccggtatctcggcagccgggaggcgggcagtgccgcgagggcgctgacgctcgcgagcagcaggaagccgagcctgagggtgcgcagccgctgctcctcgttgagggtgacagcggcgtccacctgcgaggggtctgcgggggtcctggcgagcacctctcgcaggtcgtcgttgctgatgaagttcgcattgtcgagatcgacctgcttgacgaggctctcgggaagctccgggtgctgcgccacggcgccgccgacccccatccccagcgtggtcaccagcaccgcgcccatcacggcggtgccgacggccgaggccagattctgggtggtgccaccgatggatccgacatcaccggccagccgcttcggggcgacggcgacgagaacgctgaggagtgctccttcgcgtcggccgtttttccagaggaggcctgcgtccgcgagtcggtcttcaatggacatgtctcagccgttctctttgtaggtgtctcgttgagtgacgtactctgaccagtcgcgggtggcgagggcgggggccttgacccgcctcagccagtttgtccgcctttcgccgcagcgttgtgtacttctctgcccgtgatcccagcagatagtcgaagacagtctgcttctgttcggcaatgacctgatcatggcgctccgcctgctcgttgtgcctcgtgacggccccgatgagctctgcagcgggtgaggcgatgtcaagtaccgaccattccggggcctcgggcgtggcaccaggatcgtatgccttggccttcagggcggcctggatcgcctccagcgcggcgactcgctggtcgatggcggtctccacctgtttcagggcgtccttgtagtccgaccgaaactcgctggtgagtctctcgggcaccggtaaccgctcacaccaagcttccagcgccttcttctcatctgcgacatcgtgcaggagtgcgttcgccttgccgcggatctgggtccagctctggtcgaaatgacgggccagctcgtcacggcgactggcagtgatcaccccggcgcagaacaggcagtggtcgtgcccctcgtgcaatgcgagaccgtccgcaacccacgtctgggctgccggattggtctccagagcaccgatggccactcgggagggggtctcgcccagcagtttcgacagtccggtcaggcggccgcccaccccagcgggggcaggctcgacgtctggcacccgcggtagcggtccttcgctcaggcctctcaatgccgcggcgtgggcctcggcattgagagccgtccccgtgaacccactcagcctcttctccaccgcggggcgcgagtatcgactcttggtataagagccgtcaaactgttgaagctcggagacgatctgggtctggatctcgccgatgagtgtgtcgacctctttcttggcagtggaatgctccttgccagtcactttggccttgtcgtcgaacttcgtgatgtcttcggcgagttgatcctcttttgccttggcatcgatggcttccttgcccagcgtcacaatccctggggcgctgccaccatcaaggaaggcggacagattggcgtcgatccacttgcgcgtgaagaccgccggcggcaccgagaggctgccaccgccagcaccaacgccgtgcttcttgccgctctcgtcctcccacacaactttcgtgggacagtccccttcggccagatccagaagcaactcggccacggtcgacttcccactgccgttgtggccgtacacgaccgttttgcgtccggcaggaacatcggccggccagaagcccctgtccaaggatctccacgcgtctttgacatcaagtctgcgaagcatgtctggaccctagtaacacttcatgggacacatcatggcacccgcggtatttgttctgggacgtgtcagtggcccgggttacggtgtgggcatgttcggtcgtgtggaggtcgtgggtccggtggccgccgagacggctgcggtgggtgtgccgatggcgaccgagtcggtgcctgcgggctggccgtcgcctgccgccgactatttcgacggggatgtcgacctcaatgagcacctgttggtcaaccggccggcgtccttcatcgtgcgggtggccggggactcgatgatcggggccgggatcttcgacggtgacgagctggtcgtcgaccggtccctggagccggtcgacggggacgtggtgatcgctgtggtcgatgacgagctcacggtcaagacattgcacctgggcgaaggcggaccggagttgcgcccggagaaccctgcctatccggtgatccgtccgatcagcgacctgcgggtctggggtgtggtgacgacatgcctgcaccacctgcaccactgaccccgtctcctacaggccggccggggcgggtgatgctggtcgacgtggactcctgctacgccgcatgcgagcgggtgttccaccccgagctggagggtgttcccctggtggtgctgtccaacaacgacggctgcgtggtcgcccgcagttccgaggccaaggcgctgggcatcgagatgggcgtcccctggttcaagctcaaggcctgggccgaccgccacggggtcgtggcgaggtcgtcgaactatgagctgtacggcagcatctcggcgcggatcatggcgatcctgggcgagtacaccccggcggtggaggtgtactccatcgacgaggcgttcctgcggttgcccggtagtccggccgagctgacggagatgggccggcggatccgccggcggatcctccacgacctgggggtcccggtctcggtggggatcggtgccactcacaccctggcgaagctcgcctcccacggggccaagcactcccccactctgggtcacgtcgctgacctcgacgcctaccggcccggccaggtcgacgcgatcctggaggcgaccccggtcgccgacctgtggggtgtgggccggcgcctggacgcccgactggccgccatgggtatccgcaccgcccgccagctacgcgatgccgaccctgcggtgatgcgccgacggttcaacgtgaacctggcccgcacgatcctggagttgcgcggcaccgactgcatcaccattgacgaccgcgacgctgaccggaccggccagatcatgttctcccggtcgttctccacaccggtgaccgacccgacccagatgcatcaggttctggcgatctatgcccagcaggccgccacccggctgcgtcaccagcactcggtggccgccgggctgtgggtcttcgcctccacgagttggtatgtctcccccgtgcatcaggtgagcctggctggccggctcccccatcccgctgatgatccggtgaccatcgtcaaggcggcctgcgatctgctgctggatcgcatcgagcccggccgccggtacgtccgggccgggatctcgttgctggacctggcgccggccggcgcccaaccgatgctcgaccccttctcccccgaccctcgcctggcccgcctgggcgccttggtcgatcgggtcaacgccgcctgcgggcgcggggccctgggcctgggatgggccgggatcacagctcccccggactggcagatgcgccgcgagatgctgtccaaccggggcaccacccactgggccgaactagccaccgtcaccgcaacatgaggagaggcagatgatgagccgttgagtcttgagagggcaacccgacccgcgacgaaggagccggccggggcggcagccaggtcagtggtcgtctggccagggaaacagggagggcaggtgggagaacgccagggtttcatcggggccgatctcgatcccggagtcctcatgagacccggtcgcgtgggcgatcgccgccaggaccagggcgaccgattcgcgatcgattcccgagatgtcctcggacaggtcgacagcgggtccgcccagcagtgacgcggcgatccggacgagcttccgctcgctacccgaccacggctgtgaggcctccagcagcacggcggtgtcgatcgaggcgagatcacctcgccgaatgatccacggcgcaccgtcgtagacgacatggcctgaccggatcagcagctccacaccggcctcactcggccagataccacgggcccaggcacgcacgtcctcagtgatcgacgtcatggctttgagccttcgagcttgtccaggtgcgcactaacggcgtcctcgaccacttgagaagcagtcgtggagtgcgtcacggcccagagcttcacgcgctggtgcaggtcgggtgccatccggatggagacagtgatcctttcgggtgctgggtcgtcccggtggaacgtgtcggcgactttggtcggggttgccttcgtaggtctgctcttcagcgccatgtcagatctccttcatgatctcgtccagcacgatgtcgtatccccatagctccgtggggatggtgcccaccgccgaggcgatggcctcacgcaggggtatgaggctcttcccagatgagggtgtagcgcacgtcgcgcggcgggccggcgcgtcggtggccggatagaggtcgaggtctcccgaggatgagagctcctacacactcagcccgaaagacctcgacgtgcacgacgctaccgtcggcgggcgcgctgatgcgttcgccagccccgacctgactgccttctgccgcctcgacgaactcggcctcgttgtcaccgggcagcgactcgagccggatcgtgccgtattggcctgccaggtggtcgagcccgaccagtggtgccggcgctgcggctgcgaagggagaccacgtgacaccgtggtccgacggcttgcccacgaaccactgggctggcggcccacgacgctggaggtcgtcgtgcgccgttaccgctgcagcggctgcgggtatgtgtggcgccaggacaccaccgccgcggccgagccccgggccaagttgtctcggcgcgctctgcggtgggcgctggaagggatcgtggtccagcacctgaccgtggctcgggtcgccgaggggctcggggtggcctgggacaccgcccacgacgccgttctggccgagggcaagcgggtgctgatcgacgaggagcaccgactcgacgacctcagcgccaccggccacgacgtccacggcatcctcgccgacaccatcaccaccaagcccctacccgacgaccaccccgccgcagccctgctctggcgactcacccgcatcaccactcccgagcccaccccacacgaggttccgatggccgatgagacatcggtggagctgccgggcccggacgaccccgccacccgactggcgctgctcggcatggtccgcgacgtcaccggcccgaccccgcccagcgacgccatgctgcgccacgaactcgaccgcgccgacgccttggccgactcccccgtcctcgccgagcggctccaccaggtcaaccaactcgcccaggactactacgccagctgcttcccccagtcctgggcgcagccctacctcgccgaacgcctcggcgtcgacctggccggccaccccaccatccaacccggacacgcccccgccggctggaccaacctcgccaaccgcctaaggcgccacggcgtcaccgacctcgaaatgctcaccgccggactcgtcaaacccgcctccaccggccgtctcatcgaccgcttccgcgaccgcctcaccctgcccatcaccgaccaagacgggcacatcctcggcttcgtcgcccgagccaaccccaccattccggcagaccaagccggccccaaatacctcaacacccccaccacccccatctacagcaagggcgaccagttctacggccaccccaccgccaccagcacccctgtcatagtcgaaggccccctcgacgccatcgccatcactctcgccactgcaggccgctacaccggcctcgcacccctcggcacatccctcaccgaccagcaggcagctctgctcgccgaccaggaacgagtcgtcctggccaccgacaacgacaccgccggcaacaccgccgccaacaaggaccacttcaaactcgccgtccaccgcaccgacaccctgcgcgccgaactcccccaaggcagcgaccccgccgaactcctcatcacccacggacctgcagccctcacccaatccctccacaacgcgacccccaccatcgaccggatcgtcagctacgcgaatgacgatgccgcggtggacctggcgctctccgccatcgcagccgcccatcccagcgcgtggcagtcgggcctggaggagctcagcgaacagacgaaactcccgcaggagcagctgcaagcgcgactcgtgcccttggtcgaggcatggaacgacgatccccgagaagccgccgcaggcgctgcgccacagcagaggggacctttccaacgagcggccaccagcgcacgccctgggcacggcggcgaagtaccgcagagtcgccggaccgcagctccccatcggtaacagcatcaaatgtgcatgacattgatcatctgccgatgtgcgcgcgttgctgcgcacggcctcagcacactctgagtgtcgttctgtgggcgcattcaactggtcgtcgcaacaccttgatgtgagaggtgtggaggatggctaccaagcattggagcatgaggactggcgatgtccccgaggggttgcggcgtcagtggcgagcggacagggccttgcggccggcgatgttctctccgggcaggccgcaaccgtctcggacggtgcagcgtgacttctggcgtctcattgcgacggggatctcaacggcggaggccgcgctcgtggtgggtgtgtcgatcccggtggcctcgcggtggttccgccacgctggcggcatgccaccgatcagtctggtcgaacccagtgggcgatatctcagcttcgccgagcgtgaggagatcgccatcctgaaggcccagggcaagggggttcgcaccatcgcccgggctctgggccgtgatccgggcacgatcagtcgtgagctgcgccgcaacgccgctacccgaggcgggaaactcgaataccgagccatggtcgcccagtggaaagcccacgaggccgccaagaggcccaaagaagcgaagatggtgaccaacccgcggctgcgtgactacgtccaggaccggctcaccggcaaggtcacccaccctgacggccgcaccgtcaacggcccagacacgccagtctggaaagggttgaacaagccccaccgggccgaccgtcgctggtcgaaggcctggagcccggagcagatcagccgccgcctgcgcatcgagttcggtgatgatgagtccatgcggatcagtcacgaggcgatctaccagtcactgttcatcgagggccgcggggcgctgaagcgggacctggtgacctgcctgcgcaccggcagggctctgcgctcgccgcgtgagcgttcgcggaacaagccccatggccatgtcaccgccgatgtcgtgatcagcgaacggcccgcggaggccgcggatcgggctgttcccggccactgggaaggcgacctgatcatcggcaccggccgctccgcgatcggcaccttggtcgaacgccacagccgcgccacgatcctggtccatctgcctcgcttggagggctggggccagacgccgccggtcaagaacggcccctcgctgggcggttacggtgcggtcgcgatgaacaccgcgctcgccgcgtcgatcaccgctctgccgcagcagctgcgcaagaccatcacctgggaccgcggcaaggaactatccgctcacgccaccttcgccctggagaccggcacgaaggtctacttcgctgacccccacagcccatggcagcggcccagcaacgagaacaccaacgggctgctgcgtcagtacttccccaagggcaccgacctgtcccgctggacagcagaagatctggaagccgtggcccacaccctaaacaaccgcccccgcaagaccctcggctggagaacaccggccgaggtcttcgaagagcaactacgatccttggaagaagccggtgttgcgacgaccggttgaacctgccgtggctccgaccagcagagcgatgtcagcagttggctttccatctcagcggcgccgctggaaggatgcccaccggcaaatcccgcacctcgtggattgcgagcgttgcgagcgagagcgtgcctacgcgaaggagaattgtgatggacgttgacctgctggtgatcggctggggcaaggcaggcaagaccctggcggggcgcttcgcggccgccggcaagaccgtggcgctggtggagcgctcgcccgagatgtacggcggcacctgcatcaacatcgcctgcgtgccgaccaaggacctcgtcgtctcggccgaggagcgtcgcgactccgacgacccgcaggagttcttccgcaccgccgtcgccggccgcgacgcgctgatcggcacgctcaacgccgcgaaccaccagatgctggagaagccgggcgtcaccctggtggacggcaccgcccggttcaccggcccgcggacggtcgtcgtcgacaccgccgagggccaggtggagctcaccggcgagaccgtggtgatcggcaccggtgcgacctcgcgccgcgtcgacctgcccggcttcgactcaccgcgggtgttcgactcgaccaccatccagcacatcgacccgctgcccgaacggctggtgatcgtgggcggcggcttcattgggctggagttcgctagcatgttcacccacttcggctccaaggtcaccatcctcgaccgcggcgaggagttccttccccgcgtcgaccgggacgtggccgaggccgtgaggcagaccctgctcgacatgggcgtcaccatcgagcagggcgtccggcccacgtcgctggacgacgacggcacacacgccgtggtgcacaccaccaagggcgatttcgcggccgaggccgtgctggtggccgccggacgcgtgccggtcaccggcgagctgggcctggaggccgcccgcatcgaggtggacgagcggggcttcgtcgtcgtggacgaccagctgcagaccagcgtccccggtgtgtacgcggtgggcgacgtcaacggcggcccgcagttcacctacatctcgctggacgacaaccgcatcgtgtgggacgcggtgatgggccagggcacgcgccgccgcagcgaccgcgtggcggtgccgaacaccaccttcatcaccccgccgctgtcgatggtgggcatggacgagacccaggcccgcaagtccggccgcaacgtcctgatggcgaagaaggaggtggcgaagatcgccgccatgccccggccgaagatcgtcggcgagacccacggcctgttcaagctgttcgtcgacgccgacagccaagagatcctcggcgcgacgatcttctccatcgactcccaggagctggtcaacatggtcgccctggccatccggctgggcgccaaggtctccgacctgcgcgacgggatctggacccacccgtccagcaccgaggccttcaacgaggtgctcggcaccctggagccattggcctgaccgctcaggcacgagtacgccctccgacccgatgggtcggagggcgttctgcttcgacgggggcggtcgggcccggcgtccggccccgccgccgacgcaggcaccgcatgtcttggaggctgaccgacccgccccggaaatagaccctgccggatcgtggttcgaataggtgtaccctgtaggggtatgcatcgcaagatggctcggttcgaggcgtccgtgctgtcgtcgatgccatcgccgctaatcccgacctgaccgccactgtgctccaaactgtcggcgtaaagggatgggacgggttcatcctcgtccgcagaggctagagcggaacgggcgggctacccgcgatcagaacgtcctcaactgccgcgccgagggcgtgtgcacgcggtcgtgtcgatggccggtcgttcagcggccgcggtttcgggggtggttgcgggcctgtcgctcgttccctcgccggtagttgcccgtgagcctcgccatgagctcttgcgggtcttcctgctcgacgtcttcgtggggttacccgcaagtttcggacggttggattggttcaggcggcccgtgtcagggctgccgcgtgttgggcttcgaactcgactggggtctggtagccgatcgctgagttgaggcgcttcgtgttgtagaagtcgtagatccactcctccacgccctgaatggcctgctggggggtgtcccactcgtagcggtcgtagaactcagccttcaacacggaccactgggattcgatcatcgcattgtcccagcacaccccggtgcgtcccattgactggtcgaggtggagttcccggcagcactcatacatctgctcggaggtgaattgggcaggttcaaccggtcgtcgcaacaccggcttcttccaaggatcgtagttgctcttcgaagacctcggccggtgttctccagccgagggtcttgcgggggcggttgtttagggtgtgggccacggcttccagatcttctgctgtccagcgggacaggtcggtgcccttggggaagtactgacgcagcagcccgttggtgttctcgttgctgggccgctgccatgggctgtgggggtcagcgaagtagaccttcgtgccggtctccagggcgaaggtggcgtgagcggatagttccttgccgcggtcccaggtgatggtcttgcgcagctgctgcggcagagcggtgatcgacgcggcgagcgcggtgttcatcgcgaccgcaccgtaaccgcccagcgaggggccgttcttgaccggcggcgtctggccccagccctccaagcgaggcagatggaccaggatcgtggcgcggctgtggcgttcgaccaaggtgccgatcgcggagcggccggtgccgatgatcaggtcgccttcccagtggccgggaacagcccgatccgcggcctccgcgggccgttcgctgatcacgacatcggcggtgacatggccatggggcttgttccgcgaacgctcacgcggcgagcgcagagccctgccggtgcgcaggcaggtcaccaggtcccgcttcagcgccccgcggccctcgatgaacagtgactggtagatcgcctcgtgactgatccgcatggactcatcatcaccgaactcgatgcgcaggcggcggctgatctgctccgggctccaggccttcgaccagcgacggtcggcccggtggggcttgttcaaccctttccagactggcgtgtctgggccgttgacggtgcggccgtcagggtgggtgaccttgccggcgagccggtcctggacgtagtcacgcagccgcgggttggtcaccatcttcgcttctttgggcctcttggcggcctcgtgggctttccactgggcgaccatggctcggtattcgagtttcccgcctcgggtagcggcgttgcggcgcagctcacgactgatcgtgcccggatcacggcccagagcccgggcgatggtgcgaacccccttgccctgggccttcaggatggcgatctcctcacgctcggcgaagctgagatatcgcccactgggttcgaccagactgatcggtggcatgccgccagcgtggcggaaccaccgcgaggccaccgggatcgacacacccaccacgagcgcggcctccgccgttgagatccccgtcgcaatgagacgccagaagtcacgctgcaccgtccgagacggttgcggcctgcccggagagaacatcgccggccgcaaggccctgtccgctcgccactgacgccgcaacccctcggggacatcgccagtcctcatgctccaatgcttggtagccatcctccacacctctcacatcaaggtgttgcgacgaccagttgaatgcgccttgcgtgccacggtcggaatggatgatcactttcctgggcgcgttcgggcgaagaatgcgagcccggcgcaacgcctcctccacgaggtccgtcgtcatggtcgtcgacatggcggttgcgatgaccttccgggagcaagcgtccttgatggcgcacaggtacacccacccggcccgcgtcctcaggtaggtgatgtcggtgacccacacgcgatccacctgccccgtgtcccagtgtcgcttgacccggtcagggatcgaatgcgtgcgcgtccccggtatcgtcgtcaccggacggaaccggcgcggactgatgcccgcaaggccctgacggcgcatcgaggccgccaccgtcttacgatccaccaccaccccctcacggcgaagctgggcgcacacacgcaggtacccgtacgtgcttcgggagtccacccatatgcggcgcaccgcctcatccaggcgccgacgcgcccggaggctggggagaagatgatccccatcccgctgctgggccgcaacccacgcgtagtacccggaagtggacactttcaacaggcgggccatccgggcaatcgggtaccgagccttctccgcctgcatcaacgtgtacttctcactcactgatgcttcgcagcgaagaaggccgctgcttttcccaagaactcgttgtccatccgcaggtccgcgttctccttgcggagccgcttcaactcctcgcgttcatccggactcaacgtgctcggcgtcatggtctccttctctgccttcacccacctgcccaacagttggggacccagccccagctcctgggcgacctcggcgatcgtgcgacccgagtcgatcaccatcctcgccgcctcatggcggtactgggccatgaacttgcgacgctgcctccgcgtcttctcgttccccgtgctcatgacaacaccttcccccagggccaccaggccccgccacatcaggtgtccgaaaaaccagggtaggcccagccccttgttgcactggtgccatcgttatcccgtgggatcacgccgtgatcgcccacaccccgccctcccccgccctcccccgccccctcagcggggctccgagaactgtcagagggctggggcataattggcgaggccgaccggtgcaatcccccaagttcccgtcaacggcgaggagagcatcccagatgagcgaccagtacggaccccacccgcaccagccccgccgggacgacgccacgcctgccgacgccgcccggaacgacgccggacccgcccggagcgcgacgggtcccacccaaggcgatgcggatccgtgggccgccatgggtggccccgatacgcagagcccctgggcgcgcccccaccgcgccgtgtcgaatgcccaggcgccgaacagccccacaccgaacggcccggtaccggacaaccgggtgccgaacgggcgggcactgaacagcccaacaccgaacggcccagcgccggataccccagcgccggacagcccagtgccgacggctcccttcttcattcccggtgactatccaccgcccgcgccgggccagcagccctggggcggctacccggtacagcaggggcaggccagcttcgggggcgggtggacgccaccgccgccgggccccggccagagcagctggggcggtggctgggggccggccccgcagcctccccgacgacgccgtgggcctctgttgttggtgatcggcctggccctggtggtgttcaccggcgccctgttcggctcgatcggcgtgctgctgcgtccgaccatgccaggcctggccccgccggcaagcggcgccgccagctggggcaattacacgcccttcatgccgaacgcctcaccgaacaatccgggcgccacggtgcgccccactgccccatcggccgagcagaccgacgcgagcggtgaccagatccgtggcgtggccatcgtggaggccatgttgtcggtcaccgagggatcggccggcaccggcatggtgatcggcgattcgggcatcgtgctgacgaactaccacgtggtgcagggcaccaatggcacgatcaatgtgacgatcgcgtccaccgggtcgacctacagcgccaaggtgctggggcacgacaaggccaatgacgtggccctgctcagcctcaatggggccagcgggctgccgaccgtgaaaatcgacgccgatggcgtgcgcgccggcgaccaggtgacctcggtgggcaacaccgacggacgacgcaagatcatggccgcccccggcgaggtgctgtcgaccaacgagtcgatcctcacccgcgacgagggcagcaccgcgacgaaccaactgtcgggtgtctacgagacgagttcgcgcgccatgcacggcgattcgggcggacccacctacgactcccagaccgaggtgatcggcctgaccaccgccgggagcgccgacgacggcagccagttcgccacggcctatgtggtgcccatcgcgcgggcgctcgacatcgccaacaagatctcaaggaatgaaccttcgggcaccgtgcaaatggggccgtgacaggcgtaaacgtcgcggtccacaggttaatcacaggtttcgcccagctgggcgacaacctcgccgcttctaattgttggtgcggtgactgaccgaaacaccgtgcacgaccccggctggttagctcgctggtcgggaggcaggacgaggaacgatgggcccgcgagagactgggccgcacggcagctggtttgctcgttgctggctgtcgagcaccataggctcgcgggcattgaaactcccatgccgatgagggttttcctggtcggacatcaccccgtgcaatgccgcaccgagattgcaccaccgcttcttcatacgaacagagccagaggggctccccacatgtggggagcccctctggtgttccggcaccttcacgagggccggaaaacacccgccatcgctcacaggaatggcacagagaccactcaggctcggaacaacgcggccacctctaatggttgtcgacggtgactgaccgaaacaccgtggaaggcccgggcagctagctcctgaccgggcagacgcagggcgggaagagggacgacgatgagcgaacgaaatgaccagtacgacgcacactcggctgagggtgcgggcaccggttcaaccacgcccgccggctcgggtcctgccatgcagcccccggcgacgcagcaatcctcggctgcccagcagggctggcaggccccccgggagacctgggacgcgacctggtcgccggcatcgctcgatgacggcagctccaccttcaacgccgacccgtcggcggctgcggcattcagcaatgctgcgggcaacgggggtggctacggcggatacccgcccgcaccgaatggcgcgaactggggcgtctatcccccctcgaacaatcacaagggccccaacaccaggttggccgccctgctcaccgcgctggtggtcgtgctcgccatggcggtcgcgctggtggcccccaattggtcgggctcgggcatcggccaactgccggtgagcaccccctcggccacccagcccgcgcaggcgagcccctccaccagttcccagcgggcggtggcgcagtcgcagaccacggccagcgaggcgcagagcaagggcgtggtgctcatcaccacgcagaccacctcgggtgcggccgccggctccggcatggtgctcagctccgacggctatgtgttgacgaactaccacgtggtggagaccagcacccagatcaccgcgaccgtggcgtcgacgaacaagcagtacaacgcgaccgtggtgggccgtgacgccaccaatgacgtggcgctgctcaagctcgacggcgcctcgggcctcgacaccgtgaccatcgacagcgacaccgtcaacaccggcgaccaggtgaccgccgtgggcaattcgtcgggccagggctatctgtcggccgccaccgggcaggtggtgtccacctcgtcgagcatcacggtgcagaacgagaccagcgcttcccagaccgagacgctgaccaatgtgtacgagacgagcacccaggcggtgcccggtgactcgggcggcccgatgttcgacgccgagaatgaggtgatgggcatcaccaccgccggcgaaacccagacgaactcccgcaccggccagtcgagcacggtgtcgagctatgcgatcccgatcgcgcgggcgatgtccatcgtcaagcagatcgagtcgggccagtcctcgggcacggtgcaggtgggacccaaggcctacctgggcgtgaccgtgcagtcctcgcagtcgggcagcgtgaccatctcgcaggtggtctccgacgggccggccgcagcggccgggttgagcgtcggccaggtgatcaccgcggtggacggcacccggattgattcgcaggccacgctgagcagcgtgttggcgcagcacaagccgggcgacaaggtctcggtcaccgtgtcgtcgggatacggcggcggcacgcagacggcgtccctcaccctgggcaccagcccgatcaactgagcgtcaggccgcaggggcctggatgttgaagctggccccgtactgggtggaatccatgatggtggtcgaggtgataccgccggtggtcaccgaggtctgcacgcgcaccgggcggaagtcctggtcgacccagtagccggtctcgtcgtgggccagcacgctgggcgaggcggacccgggggccaccacgggcttgaagacgaagtggtgggccctcacctgattgacgtcctcatcgccggcatagaccaccgaggcgatctcgccggccacctggcccacatagttgtccatgcccttgcccgagaccaccgccgaggcgctgttggtggtgtgggcccagccggcaccggcagcgcgcgtccacatgtccgagccgatgtagatcgtctcggtgccggtactcgtgatggaacgcaccttcgggcgcgccgcgtcggtgaaatcgtactggaaagtggtggtcgactcctgggtgccggcctgcggggtcaccgtcctggtggtcatcaccgtctggtagctcttgatcgtctgctgggcgcccgcgcaccgggcgacgaacgaggccttgtccaccgtgccgccgggagcgggcaggtccaagcgggtgagcaccgacgcgctcgcccccgacgaggaggcgtcgccgcgggggttctgggcggcgcaaccgcccagaatgatggcggcggccagtgccggggcaaccaacgccggggcaatgagtcgacgaagtgtcatggcgggccttcttgacctgttgaggacgggtggaggtgacggccaccatgctagggccccccgcgcacggaatatcaggtggtaacgctgctcgcgcacgtgctccgagttgccggggtccctccacaaccggcgcgaaacagaccacaatggtgccatgtccgtagtcgaacgccgccagatcaacgcagccatcaacctgaggctttcgttgctgggcctgccccatcccgacagcaatgctgagagccccgatgcgatccttgtggagccgctgctggcccgccagcgcgagttgagtcggcggttgaaggatcggctcagtgcccccgacctgcgcatccagcgcttcctcgacgactacctggccgactgcgatgagcacccccagctgccacgcaccaccttggtgctcgacgagccgggcctggcccgcggcctgtcgctgccggtggacggcgacgaattccattccgacatcgtggcgtcatatcgccttgtcaacggcgtattgcacaaccccaagcatgaccgacgcaccaccgccggggtgttccacatctccaccggcggcctgcccatcccccaggacaaggtggaggtggacaagaacgtctacgcccgcatcctggcgcgcgccttccaagcccccgacgaggagctggcgctgccctacaccgccaacctgcccgagcaggcgcactgttgggcgtcgctgctcatgcgccccacggtgttgccggccgtgcccgggcgcaccaccgagaagagctacgaggtgcacttcatcgtgcccggtggcctgatgtgcaacctggacttcgtggagggcatcttcggcaatgccggcgacccctacctgcccgagaacgacgcctcgctcgacccggacagctggaccggccacaccggctgcgtgatcctggccccgcatctcaccacgatgaccaagaagagcctgggcatgccgcactacgacgacgccaccgagcgccagcgtcgcgatggccagtgctggcgtcacgaggacgacctctacaacgacggcaaggccttcaaggtgtgtgcccgcgatgagcgcggcgtgatcgtcaccgtgatcgccgacaactacttcggctattgcaagaaggaggtgaagacccagatcagctattcggccaacctgttgggcggtgccgaggaggagcattccggtggcgccgaggtgtatccggcatggaacctgaaccaggacttcaccgaccgcacgcccgacgacttcacgctggccgatgtgatctcggccaatggcgacctgttggacgtgcgtcccgagggatatgccgtctacaagcccgaacccaatatcgtgttcattccggagcattcgaactattcgatgcgcacccagacgatcagctggacgacccatggcgccgagcagaccatcaagttgctggccggcaagcactatctgtcgcccgacggctatcgcatccatgccaagcaccgcgagatggatgccacccagtggcacctgatcggcacctcgtcgcgggcggtcacctgccacaagccggccaccgtgtcgggtggcggcaagagcgagatcagcaagtcgatcagtgacgccttcgtgttcggcaatgccttctcgcacgatatcgacagcgccatggaccaggtgcaggcgctcttcgacaccgatttcaccaatcgctttgccgacgcgtcccgcaatggcaccgaccatcgtcccgtgttgtcgattgaccgctcgctgggttcggtgatcaagctgctcaccccgtcaatccagtacaacgatgaatacaacgccttcctcgagggcattgagcccgatgtgaaggaattggcgttcaccgtcaagcgctattacctgcccgaatggggtgaggactggcgcagccatttcaccgtgggcatcatgaatggccggcacgggaacatggtgcgcctggacggcaagaagatcatcaccaatatgttgcgggtgggtttccgtgaggacggctcgtggcgcctgttcacgctgcgccccgattacagcccggccgtgaaggtgcagaccgaggacgacatcaccgccagcacggtgaccccgccgtgggaggacgccgagggcctgccgcgcaagtacgtgaccaactgcgagcacctgctgttccagcgtcctgacgatgcgatccaccgcggctacgacaagcaggccgagttcgacctggccagcggcaccgacaccttcatctcgaacttcgagccgctcacccatgagcaggcacgcgacctgctgaccgatgtgcaggcctacagcgagttcaccaagccggtgcgcaagctcatcgagcgggttgccgcgatgcccgacgaccagtcgcccgagttctgggtgtgctccgatgatccgcgccacctgcccgacggcggccggtcgaagaacccgcgctacctgcaggtgcgtcccaccgactccaacccggagctgaccacggtggccgatgtggccggcaagctggcacgcaagctcccgctggcgggccatgcgccgcagccgatcgacgtggtcgccgcgggccggcgcaacaacccgccggaggacaagattccggcgctgtgcgcctacaacccgctgcactacatggagctgcccgagctgttcatggagtacatcagctcgatgaccggcaagtcgccgtccaccacgggtgccggctcggagggcgcgctcaccaagggcccgttcaacgcgctgcccgcggtctacgacctgaatgcggcggtgctgagctatgcgctcaccgactatgacggctggctcagctcggcgggctatatcgggccgaatgcccgggttgaccacgacatctcgatgctgattcccgagctgttctcgcacatggggcccaacgaccgcaatacgaagcggctgatctccgagggctacctggagaagatgcaggacttcgacttcgacgggcaccgcgtgctcgcgagccggctgggctaccgcatcaacgaccgtttcgtcacccactacttcggacgcatcttcctgcaccccgacgtggtgttcagcgaggaaatgttgcgtcctgagctccaggacgagaagatcttcgccgattcgatcgatgtgatcgtcaagacgcaccagcgggtggcgcagatgtacttcgacgacggcaccgtgtcgctggcctgcccgccgatccgggcgctgctggagatcatggcgcacggcgcgtcggccgagggttggacgctggacagcccggagttccgcaagctgttcgagcgcgagtcggtgctggcgtcggattggtatgcgcagcgcctcgacgccaagcaggccgaggacgtgaagcaggccgaggagggcgtcgagcgcctcaaggagtacatcgggcgctccgattcgggttcggtgaccggacgcctgcacctggccgatcgcctgcgtgagctggaggcgcagttgacctacgaacgctcgccggaataccgccagtcgctggtgggcacgctgggacgtcagcccaggttcgtctgatcggccgcttgccctttcgtccctgagtgggcagttgtgcgggaatgacgccgcacaactgcccacttggacgactcccagcacgaggaacagcgtcccgccgccttcgatcccgcggcagacgtcctccggaccggaatgggcaggcatcgcttgcgacgcatggcttccccgatgattgggtcctccgatggcgtgccgcgcgttaatctcctgatttcagaggaaacctccgccatgagccgtcgccagcggcggtggtgatgactggccccttcgcaccgatccccctctctctgatccggaggacacaaatgcgatctttctatgaagactcaaggcgtgttgtcgccgccctgctgatcgcaggcctgggcatccaagggacgctcgcactcattcgtggccctgagatttcgagatgggtgaccaccatgggcggcggggtcccggtgcttctcctgtgcctggtggtgggctcgccgaggccacgcctcttggtcgatgcactggcattcctgacgtgcgcactgtcaatcggcgtcagttggggtgcgtccgcccaaggctccgcatatctcacgtatgtcccaccaatcatcgtggcaacctgtttcgccaccgcggcactgattctgcgcgcagaggggcaactcgccagggaccacagccaaccacgcttgtgactccggaggggcgcgaaccccggcaggccaccacgtccaccatctccgccgcccaatcccctgccacggttccggacctgcgcaggttcctcgtctggtcccagcagcgaatgcccttgccggtgccggaaagctccccgcacgaaagccgggaaaatcccgcggtgcgacatgagcataactatgctcatgcatatgccaaccaggaacgtctacgtatctgagccagatctaccggtgttcgatgcagctgcgcagttggcggggagcttatcgacggcggttgctgccggactacggctctatctcgcggaacgtgagaagcagcagggaaggcacgacatgaagacgattgaggtcgatgttgacgagggcccgatcgtggcgaccaagcgtttcgccggccgccagctgctccgctggagcgccgaggacggtacccgatcccactcgttccggatcttccggacggccaatgaccagttcgccgtgtatgcgcgcgacgacccgaactgggcggccatctccgacccagcagacgacaatccaatctggaacaacccgaagacctggggcggggactggtggcgaaagggcaggcgtgaactcaaggtattcgccaccatcgccgacatgcagggggtgctccccgatgagctcgtggcagccgtcgggcagactgtcgagcatccgccggtggaggacctggatatctgatccccctccaccgctgagtggatggtcgtggtgaatagacgcatcgaaaccatccactcagtgccggctccgcacgccccatgtgcacaatggagtcagccaacgagatggagcacacgatgaggcatctgcagatttctggcgtatccgtgccggccatcggcatcggcacctggcacatgggtggcagcccggcgcgcttcgacgccgaatgcgacgccctgcgcgccggcatcgacgctggcgcgcgggtgatcgacaccgccgagatgtacggctcgggagcctctgaatccatggtgggcacggccatcaagggccttgaccgctccgagctgttcatcatcaccaaggtgctgccgaacaacgcgtcccgcaagcagatggaacacagcctggacgcgagcctggcccgcctgggcaccgactacgccgacctgtacctgttgcactggcgcggcgaggtgccgctggaacagaccgtcgaggaaatgcagcggctgtggcacagcggcaagatcaagtcgtggggcgtgtccaacttcgaccttgccgacatggaggagctggccgccctgccccatggcaaccatgtggctgccaacgaagacctgtacaacctgtcgagccggggcatcgagttcgagctgatcggctggcagcgctcgctggacatcccactgatcgcctacagcccgctgggagcctccggcggcgaacgcggcgcgcaggagatgcgcgcgagcccggccgtgaacaaggtagccgagacccatggggtgacgccgtcgcaggtgctactggcctgggtgatccgcaacggccacaccctggcgatcccgcagacctcgaacgaggatcacatgcgcgacaacatcgccgccgccaacctcacgctgaccgacgacgacctgacgctgctcgatcaggcgttcccgccgccccgccacaaggtgccgctcgacatcctgtgatcccggccgagccggcgcacgacatcggcgccggcgtccgactactgcccggcaaccgccgtcatcaacgggctcaggccctgggcacgctcaggggcgcccaggtcgccgcatgccgccagccaattcgccagcagctggtaaccattgctcgtcatcaccgattccggatggaactgcaccgactccacgggcagttcgcgatgccgcagcgccatgatcacctggtcgtcgagcgaagtggcggtcacgtcgagcacatcgggcactgatccgggctcgacggccagcgagtggtaacgggtgacttccaacggatcgggcagcccgtcgaacacgccctgcccgtcatgggagatcatgctcatcttgccgtggcgcggctcgggggcgcgcaccacgcgtccgccaaaggccaccgccatcgcctgcaggccaaggcacaccccgaacacgggcatctgctcgcccaacgtgcgtgccacctcgacgcagaccccggcgtcctcgggagtgccggggccgggagacagcaggatgccatcgaagccgttcgcccaccccggggtggcgaagcgcgcatcgtcgttgcgccagacctcgacgcgggcgcccagctgggcaaggtactgcaccaggttgtagacgaacgagtcgtagttgtcgatgacaagaatccgcgccatggcgaacaggctacccgcgccgcgacgcccacccggcggcctccatgcggtggtccggcgcgtgacccttccccctgcgcaacccgccgggagcccggcgccgccgggagccctagcgcaccggggtggcctggttcagctgcaccgaaccggcatagccgggcatggtcacgtcggcgatgcgcttctggtcgtatcccaaccggtaggcgagcacgtactgcttgtagatctgcacattgcgcgacgccgccagcgactgctcaagcgcctgctggtcaccgatcgcagccaccacatagggcggcgaatagggcacgccattgaggatcacggtattgccgacgcatttcacgccggtggtcgagatcacccggatgccctggatggtcatggcctcggcaccgccggcccacagggcatccaccacctgctggatgtcctgttggtgcaccaccaacatgtcgggatcgaccccggccgggttctcgtcgagcggggcatcggtgagcgtcacctgcaccaccggcccacgcaccgccgtcagtccggccgcagcctccgccgaggccatcgaggccgacgccacccccgccgcctcggcgtcgtggttggacagctcgttgacctgggactgcagggccgaggcggttgacctcgcctgtgaattgtgggtggcctgggcggccaccagatcggccatgtcctgctggcgggtgggccgcaggtcagatccgtgcgaggtggtggccgcggccacgaacagcagcccggccagggcgccgaccagcacggtggccatcctgcgggtgattttccgtccacgccccggcttcttgtcagccatgaatcccctgtgcaccagacgtcgccagtaagccggaaagcccggcgtccactaggctaccgggtgacggtatccgcccatctgggcgcgcacgctcagcacacgagcacatcgatgccatcggcaacgccaggcgggccgcgaggcctcgctgggaaccccaaggagcagcaacacagtgccggagtcacagtcccgcaagaaggcccagcagaagaaggccgccaagaacaagcaggcagccgccaccaagagcgccaagaaccgcgaggccgtcaacgtctccagccgcgcctgggtgccgtgggtcttcgtgccgatgggcctgctcggagtgatctggctggtggtctactacatcggcggtcagcagatcccgctgatgtacgccctgagcaactggaacttcgtcatcgggctcggcctgatcgcaggcagcttcttcgtcgccacgctgtggaagtaggtcacgcctccggcgtggggaaataggtcacgccgccgacccggggaagtagatcgcccctcctgccggcagacgctcacccgtcatgacgtgacaaacaattgatcgatcaatttctttgatgcccgtcttctgttccgccccgccttccccggccccgatcgtggaattattctcatacctcgcaacagctttatgcaaatttgcgtgtaacatgtgataaagcaagttggttcgggaatacccccatcccaccccactccggcgacgtagctgggaccacgatgaggcccagacccgagggaggtactggcgatgcccgattacgagcagatcattccaagaatcctgaccggtgccggcaccggcgaccggcgtccatcggctgcgcctgccaaggcgcgcgtggtgggggcctatctcagccagcccctggaacaggtgaaacgccccgcctatgcgcacgcggtgctgcagctgccgggtgtcaccggcctggagattcccctgtgcaccaccatggcccgcgacgacgcgaagtggctcatggacgtgctcccacccggcgcgcgcaatatcgccaccctgatgggtgcctgcgacgaggcggccgccgacgaccccgccttcggcctggcctccaccgacccggccggacgcaaccgcgcgctcgacctgctgcagcaggcgcgccacagcatcgcccggatgaccgagcggggccagcacgtgctggcgctcgaagtgcactccagccccacccaccgcgacaacatcgacggaaccagccaggcgttcgccgcatcgttggcccaggcggccgactgggactggggcgagacggcattggtggtggagcactgcgatgccgcacgcagctcgggcggcgcgtcgaagggcttcctgaccctcgacgaggagatcgacgccgtcgagaccgtgcgggccctgtcgccacgcaccccggtgatgatgtcgatcaactggggacgctctgcgatcgacacccgcaacgccggcggcccgctcacccagatcgaccggctgcgccgacacggcctgctcgccggcgtgatcctgtcgggtgcctccgacagggcctcgtcgtacggcgccccgtggacggatgcgcaactgcccgccgcagcacccgacggcagcggcgaggcctcgtcgctgctcaccccgcaacgggccgtcgaggcgatggaacgcgccggtgaccacctgctgttcgacggcgtcaccttcgcggtcatgccgcagtggacgcccagccaggaacgcctgcgctatgtgcgcggactgttgtcggtgatgccccgcggacacctgtccgtggccttctgagctgttcccgggtgcggccaaccggccacgcccgggtcaaggggacgacttcacgccacccaacttcccgcaggctgacgggcgcgaagtcagatgccgcaggccccgcacaatggagtgcggagcccgcggtaatcatcaccgtgccggccggtagaggttgggccgtcggaagccggattggcgtgggaccaggcccccgcaggggccagcaccgatccgggactaatacgccatggccatcgcggggtcgcgcaccagcgcagcaaggtcgcgcaggaaccgcgaggcgatcgccccgtcgatcaggcgatggtcgaacgagatcgacaatgtcgtgacccagcgcggcacgatcttctcgtcgtcgccctgacccacgacccagggctgccgggtgatcgcacccatcgccaggatcgcgctctcggagccattgatgatcggggtgcccgcgtccagcccaaggccccccacgttggtgatggtgaaggtgccgtcgcggtagtcgctgggttgcagcgtgccggccttggccaggttgaccaggcgggtcagctcgtcggccatcgacagcaggtcgcggttctgcgcctgcttgatcaccggcaccatgaggccacgcggcgtgtcggcggcgatgccgatgttcacatcgtggtgcaggatgatgcgctccgagccgtcctcccagctggcattgagcatgggattgttgcgcatggccaggcagaccgccttgcaccagaccagcagggcggtgacatgcaggtccttgaactcgcggcgcttgcgcaggttggccaccagctccatcgtgccgctcacatcggtgctcacccatgcggtggtgtgcaccttggacgtgcgcgaatgcaccacattgcgcgcggtgaggcgtcgcaccgtgtcgacggggatctcctcgtcgcgcagggcacgctcgttggcaccacggcggctcacctggtgggcacgccgacgacgctcggtggagctgggcgtggactcgtcggcgggaccgtagccgaccaacatctggcgcacggtctgctgggtcggcttcgacgccggaagctcatcgagcgacaacagccgctcgccggtcatgccgccgtccaagtcgcgctgggccgacgcctcgtcggcatcgggacgcgacgccttcgccgacccctgggcggccggcgcaggggcgctggactgggccgggccggactggttcgagctggactgggctgaactggcctgggctggactggactgggcgcccggctcggcaccctgcgcgggcgcaccgccgtcatgctcgggggcggggccggtgccgtcgtcgatgaagacgatcggcgcacccaccgccacggtggtgcccgcctcggcatagatcttggtcaccttgccggcgaacggcgacggcagctcgaccagcgacttggcggtctcgatgtcgagcaggttgtcgttgaccttcacctggtcgccgaccttcacgtgccattcgacgatgtcggcctcggtgaggccctcgcccgggtcgggcatgttgtattcgggcatcggtggctcctcagtagtcgaatgacttgtcgacggcgtcgagcacccgctcggcatcgggcaggtagcccttctcgctgcgcgaggggggatacacggtgtcataaccggtgacgcgcagcacgggggcgtccaattccccccacaactcctcgtcgagccgggcggccaactcggcgccgggcccgagcgtgcggtgggcctcgtgcacgacgatcgcgcgccgggtgcgcttcagggcgtcacggatagtggccatgtcgaacggcgacaggctgcgcaggtcgatcacctgcacatcgcgtccctcggcggaggccacgcgggccgcgtcgaggcaggtctgcaccatcgggccgtaggtgagcagcgtgaggtcggcaccgggacgcacgatgcgcgccgagaacagcggcaggtcaggggccgacgtatccacctcgcccttggcgtaatagcggcgcttcggctcgaagaagatcaccggatcggggcaggcgatcgactggcggatcatccaataggcgtcatgcgggttggaacaggccaccacgtgcaggcccggagtgtgtacgaaatgcgattcgggcgattcggagtggtgctcgggtgagccgatgccgccgccgaagggaatgcgcacgaccaccggcaggctctggcgtccgtgggtgcgcgagcggtagcgggccagctggttgatgatctggtcgatgcccgggtagacgaagccgtcgaactggatctcgcagaccggacgatagccgcgcaacgccaagccgatcgcggtgccgatgatgcccgcctcggccaacggggtgtcaatcacccggtcggcaccgaagtcgtcgagcaggccctcggtgatgcggaagacaccaccaagcttgccgatgtcctcgcccatcatgagcacctggggatcttcgtccatggcatcgtgcaggccctggttgagacccttcgccagcgtgagtgtggtcattctgctgctccttcgctgggcggggtggcgagccagtcgaggcagtcggcccgctgctcgctcagatagagacccggatccgcggtgacggcgtcgaagacctccgacatcggggtgttcggcagcgcccgacaggtgtcgcgcaccagcgcaccgaaggtgtcgaggtcggcgttgagcttctcggtccacgcatagtcgatcaggccgcgctccagcagataactgcgcaggcgctcgatcgggtccttggccttccactcctcggtgacctgcgacgagcggtacttggtgggatcgtcgctggtggtgtgggggcccatgcgataggtgacggcttccacgagcaccggcccggaacccgagcgcacctcgtcgaaggcccagttgagcaccgcgtggcaggccagcgggtcgtttccgtccacccggatgccggggatgccgaagcccatcgcccgctggtagagcgggatgcgcgtctgcacgctggacggctcgctgatggcccactggttgttcacgttgaggaagaccaccggcgcctgctgcgaggcggcaaagaccagcgcctcgttcacatcgccctggctggacgcaccatcgccgtagatggtcagcgtcacggcatcgttggccgggtcggtggggtgcttggccttgtcgcgggccactcccatcgcatagccgaccgcatgcagcggctgggcgccgataatcatgtaatagggcgccacctgggcgtcgctggcgatccagcgcgacaggctcgacccgcgccacacggccaggatgtcacccagcggcacgcccttctgcagggcgatcgactgctcgcggtaagtgccgaacaccatgtcctggggcttcatcaccttggtgacggcggcctgataggcctcctggcccgacaggggcgcccacaggccgagttcgccgtgacgctgcagggctgcgccctcgacgtcgaaacggcgggcggtggtcatctggcgcagcatgtcgacgagatcctcgtcgctgccctcccaggggaaccgtggattgtcgacgagcgtgccgtcaggtgtcagcagctgcaggggctgcgtcgggtcatcggaatccatgaccgtccttcgaggagacaacaggaacctacgcgacagtaggttactgcaccgtaggttggggctgcaatcggccgacaaggcagaatggatgtgcacagcgggtgactgccgttatccgcgagtcgatgaaagcgagccacgatgagcgagttcccccaccaggaacatccgtcagaccagtttcccggaggccccgacgagcccacaaccagttctccggaatccgtcacggagttctgggaagagcgctacgcggggcccgagcacgtctggtcagcgctgccgaaccacaccttcgtgcaggttgtggcgagcctgacgccaggacgctccctcgacctgggctgcggcgagggcgccgacgccatctggctggccacccagggctggcaggccaccggctatgacatctcacagaccgcgatcggacgggcacagcaggccgccgccgagaagaacgtggccgacacgacgcacttcgaggccgtcaacctcgacgaatggtcgcaggcgcccctgcctgatgaccagggccgcggccagtacaacctgatcactgccagcttcctgcagtcaccggtggccctcgaccgcattcgcatcctgcagcgcgccgcccgcctgctggtgcgcggtggacacctgctgatggtcacccatgcggctcccccgtcgtgggctcccccggagatggccagccagggtgacttccccaagcccgaggaggacctcaaggcgctggatcccgatccgcgcttcttcgaggtgaagcttgccgagacgcggcgtcgtcccgccaccgatcccaccgggaagccggccacgatgaatgatgcggtgatcctgatccagcggattcgctaggacgaggctctgctccgaagacaaggtcgacaaaagcaccgtccacggtgcttcatccgcacctattccgctgccgccatcggcccgggccgttaggtggatacctgtgcggcgtcattgccgcacaactgcccactcagcgatagcagccactccaagcgcgccaccgcgacagggaccaggcgtcagttcaacgggcgcagcaacgggaacaggatggtctcgcggatgccggcgccggtgaacagcatcaccagccggtcgacgcccagtccgagcccacccatgggcgggcagccctgctccagggcgttgaggaagtcctcgtcgagctgcatggcctcgggatcaccagcagccgccgccagcgactgctgggtgaggatctcgcgctggatcaccggatcgatcagctccgagaagccggtgccgcgttccatgccgccgatgatcaggtcccaggcctcgatgcagcccggcttggagcgatggcgacgcgccagcggctgggcgatctcggggaagtcacacacgaaggtgggctgggtgaggcccttctccaccagctcctcgaacaggtgcagcaccatcttctggtcaatccacgacgcgtcgtagtccaccttgtgggcgtcggcgatgtggcgcaggtgctccaccggggtcttggtggtgatctcctcaccaacctcacccgacagcccctcatagaccggcagccagatccattcgcccttcaggtcgatgacaccctgatcggtggggatctcgaagatgtcgagcgcctcggccaccttcatgatgatcgacttgagcgtctcggcgatcgtgaactggtcgccccagctctggtaggcctcgagcatcgtgaactcggggctgtgcgacgagtcgacgccctcgttgcggaacacccgacccatctcatagacgcggtcggccccacccaccatgacgcgcttgaggtgcagctccagggcgatgcgaaggtacatgtcgatgtcgaaggcgttcaggtgcgtggtgaacggacgcgccgccgcgccgccgtgcaccgactgcagcaccggtgtctccacctcgaggtagccctgctcctcgagcgtctcgcggatcttgcgggtgatcaacgcccgctggcgcaccatcgtgcgcgccgccggacgcacgatcaggtcgttgtagcgctgccggacgcgcgcctcctccgacaggtcgttgtgcagggtgggcagcgggcgcagcgccttgctggcgagcttccattcgctggccatcaccgacagctcgccgcgcttggacgcaatgacgcgtccgcgcacccacacgaaatcgcccaggtcgacgtcggccttccaggcggccagcgactcgtcgcccacctcggccttcgacagcatgatctgcaggcgctcggcgtcctggtcaggggtgaagccgtcctggagcgtggcgaagcacagcttgccggaattgcggatgaagatcacccgcccgccgatggtcacctcgtcctgggtctcctcgccggcggccaggtggccccaggtggcgcgcacctcggccagcgtgtggtcgcgacgcaggtcaaccgggtaggcctgcttgccctcgtcgaggaagcgctggcgcttctcggcgcggatgcgcatctgctcgggaaggtcctgctcgacgtcggcagcctcgttcttgcggggctcgttcttgcgggactggtttccaggggactggggggccttttcgggacgctgctcactcaccatttcagcctagcgtgagccgcccatggtgccctgcccataacaagcggcccgtaacaagcggcccgtaacaagcgacccgcgacagccgccccgggaacagctgccccacacaagcggcccgcgacaacctgcccacgggctcagccgccgagctgctcctcgaccaccgtgccctcgtcggtgcgtcgcaactgccagctgcgatcgaagtgcaggccgccggcgaggtgggggtcgtgggtcaccacgagcaacgccccctggtagccgtcgagggcctcgagcagatggtcgaccgaggccatgtcgaggttgttggtgggctcgtcgagcaccagcagctgcggcgccgggtcggtgaacagcacccgggccatcgccacccggaagcgctcgccacccgacaacgtggcgggcagctggaaggccttgtcaccggtgatgaggaaccttgccaacagttcccgggcctcaccggccgtgcgctgcgcggcaacgtcgagcagggcgtcgatgcaggtgtcgaagcggtcgagctcgtcggtgcgctggctgagcacgccggtgggcacggtcggcgccagctgcaggcccaccggcgccgcgaacaggcctgcgggaaccgcgtcaacctccccgatgatcagcttgagcagcatcgacttgccggtgccgttgtctccggccacccggatgcgctcgggtccgtcgatgcgcaactgctggccggcgcccaccttcacctgcacgatctgcttgccgggcgccacggcggtgtcgggcagcggaatgcggatcacatcgggttggcgggcggccgcatcggccgccgcacgggccgcttcggcgtcatggagtcgggcattgtgcatgagtttctttcctccggtgttcttctcggcacggttggcgaggaagtcgcgctcgcccttcgacacattgccgcgagcgttctcgcgacgcgccgagcggtcacgttgctgctggcgttgctgctcggcacgcatctgcgcccgggcgcggtgcacctcggcgtcggcggaacgcagctcgcgttccgccgcggcccgctgcacctcgcgctgggcctcgaactggctgaagttgccgccgaacatggtcacctgctgggtacgcgacgcaccggcgcccacccacgacagctcacagatggcatcaacggcctccaacagcccgcggtcgtgggacaccacgatcacggcgccgggccagtgcgccagctgcccgatcagcgccgcacgggcgtgcgcatcaaggttgttggtgggctcgtcgagcagggtgacatcggcccgggccagccggctggccgccagggcgacgcccatcgcctcgccgcccgacagctcggacatgggccggtcgagccagccgacgtcggccctcaggccgagtccggcgagctcggcgaccgcgcgggcgtccacgtcccagtcgtcgccgacgaggtcgtagtcgtgcacgtccaccgagccggcctcgatgcgggtcagggcctgccggatggcggtgatgccgagctggtcggccacgctgatgtccgctgcgctcgtgacgtcctggggcagataggagcagctgccggcgacgtgcaccgagccctcggtgggcgtcagttctccggcaatgaggcgcatcagggtggtcttgccggtgccgttgtcgccgatcaggccggtgcggccggcagggaacgcggcggagacatcgctgagcacgggttggccgtcgggcagctcgaagctggcgtgatcaaccaccaccgtgggagcagcgcgcgtgaaagcagaaggggaaacaggagtatgggacatgcgagatcctggggtcgacgtcggtgggccggatggcaccggaaactcccgggtgccggatctcacagcttcaagaaaactcctgtgttggggtgccgtccactgtaagcgcacggacgccagcggccaaatggcgacggggtgacgatcacccccgggaaggaggaacccgggggtgatcaggccctgcagggcatcactactgcagggcaacccgcactgacagccggtcgcgtggatgtgtgtacacgcaccgggccgcgaggaatcccatggtcggccatggggctcagtgctgggttggcctcttcaccgccaccatggcgaccgcgctcaggtcggccttgtacgcccggaagctgttgcgcatggccagcacgcgccgacgcgcctcggggcgtcggatcatgttcgtggcgaaccgggcgaagccgatcggtccctcatcggcgatcaggcggctcggttccagcaggcgcatcggggcggtgccctgccagacgacgtcgaagccggcgtcggtgagcagtgcccgccatgcggccagcttcaccggcgtggcccccaccttgatcgtgcgcgagatctcgcgcgacacctcaccgcggccggtgcgccggtcggggtcgggggccgcatcggccagtgcgagttcgtggatggcatagcgccccccggcagccagcacgcgggcagcctcggcgacgattgcgcggcgctgctgcggcgacgacatggtgagcatcgcctcgcccaccaccaggtcggccgagcccgcatccaggccggtcgcggaggcctccgcggtgaccacgcgtgccggacgcccggcaagcacggcgtcaagcttcgcgcggccctcggtgttgggctcgatgcccacatagaacggcggacgcgctgccagcagctcggcggcggtgagccccacaccgggtccgaactccacgatgcggtcgccagcgtggggagcggcggcctcgagcatctcgcgggtcaggtgcagtccaccgggacgcagcacgcgcttgcccatgggcgccagcagccagtggccctgcaggcgcgcatcgggcacctcgtcggcgggcggcgcagaagtcaaagtctcaggggccaaggccccagcggtcaaggcctcgggggcctgacgcagccagccgcgtcggcgaccccgccgcccggccgcgggcccgttggtcgcgattccggtgctggccatcagttctcacccgccaggtgggcgccggcctcaaccatcaccaggctcatgcggcaggcggtggtggccaccagcgcgtgcggggtgccgggcgccaggtagaccacatcgccgacgtgcagggtgctctccgcaccgtccacggtgaacgacatggtgccctcgagcagctgcaccaccacggccctgggggatgcgtgctcggtgagcagctcgccggcgtcgaaggtgaactcgaccacccggatcaggtcgttgtcgagcaccacgcgcgaggtggtgctcttcggcaccaccggcaattcgctggcgaggttcgtgaagacgcctgcctgcgtcacgggggtctgctgagccatgattgagccttcctggcgacgcctcatggtgcgttaccaaggtaagcctaacctaactcacaacgtcggggcagtgccacgcccccaccgtcccgctatgtgaccacgcgctgccacgtagtcgtccgcgcggcgacgcgacgggcccatcccgccggcccgctcacatgcgccagcggtcctccgacacggcctcgatgccgtgcttgtcgcgccactgcttcaccagcgaataggcgcagagcagcccggcgatccacaccgcgccgatcggcagggcaatgcggtaatcgggcgtgaacgccatcagcaccatcacgaaaccgaggaaggccagggtggcgtagttggtccaggggttgcccggcatccggtaggccagcttggcggcaccctcgggaccgatgcgctggcggaacttcacgtcggtgtagaccaccatcacccagttggtcatggcggccatcagggcgatcgacatcacatagaggaagacggtgtcagggaacaggaaggtcagcaccacggccacggcagtgaccgccgatgacaccagcacgcccacccacggcgagccgaagcggttcaccttcatgagcgcgcggggcgcattgtgctggcgcgccaggctgtagagcatgcggccattggaatacagcccggagttgtaggccgacgcggcggcggtgagcaccaccaggttgaggatattggccgcaccggtgatgccgatcttgtcgaagatcgtcacgaagggactctcggaggtgcccagctggttccacgggaacaggcacagcatcacgaacacggcacccacgtagaacaccaggatgcgccataccacctggttgatggcccgcgggatcgtcgtgcggggattctcggcctccccggcggtgatgccgatcagctcgacgccaccgaagctgaacatcacgatcaccagccccaacagcactccccacaggcccttggggaagaagccgtcgttcacccacaggttctccacgccgatcggatggccaccattacccagcccggtggtgatgatcagggcgcccagcacgatcatcgcgatgatggcgaccaccttgatgatggcgaaccagaactcgaactcaccgaaggccttgacgctcaccaagttcaccagcgtcaccaccaccaggaaggccgccgccgacacccaggcaggcactcccggcgcccagaactgcacgtacttgcccaccacggtgagctcggccatggagaccgccacgaagttgaaccagtagttccagcccgagacgaagccggcgcgctcaccccagttgcgccaggcgtagtagctgaaggcgccggtcaccggcgtatcgacgctcatctcgcccagcgcgcgcatcaccatgaagatcgccgcaccacccaccaggtagcacagcaggatcgccgggccggcctggccgatcgactgccccgagccgtagaacagcccggtgccgatggccccacccagcgcgatcagctggatgtggcggttcttcagcccgcggcgcagcccgggctgggtggtgggatcgtcgtccaacccgctcggcgcgccggacggcacccgctgccccgtcgccccgccgccggtggtcgggcgtgctccgcgcggccgatcaggctggttgctcaccgcaattcctcccccacgcctcggcgtcgcccctcgcggacgattgtccgtggtggcacctgtgtccgcgtcggcatctgtgtctgtcgtggcccctgtgcccgccgtggcgtctgctcgtcgccggcaccggcgccgaagcgaccaaccctgacatgtaaccactttcggacgccaccggcatccgaaagccccacctcgcacggcggggcttgggtgccatggcagtatttcgcccaggagcgtgatcgcatgcaacaacggccctcgcccctgcgactgggcacgcgcgtgttcagcacagcggcccccgcggtgatggccatcatcaatcgcacccccgacagcttctacgccccgggacgcttcaccgagctcgacgacgccctggcggcgctcgaccggtgcatcgaccagggtgccgacatcgtcgacgtcggtggcgtgcgcgccggccaggacggcccctgggtgggcgaggccgaggagatcgcccgggtgcgtcccttcctggcggcggcccgccaacgccatcccgacaccctgttcagcctcgacacctggcgcgccggcgttgcccgcgcctgcgccggcctgatcgacctggtgaacgacacttgggcgggcgccgatccgcaactgctgcatgcggccgccgagcagcacgtcggctatgtggtctcacacaccggtggactggccccgcgcaccgatcccgtgggcgtgcactacggcgacgactccgacgcggccgtgctgcaggcagtgcgcgccggactgctcgacggggccgcccgcgcgctggcagcaggactgtcgcccgaccagatcgtgctggacgccacgctcgacttcggcaagaccaccgcccactcgctggcactggtgcgccacaccgacgagctcgccggcctgggccacccactgatgatggcgatcagccgcaaggacttcgtgggcgagacgctcgacctgccggtggaccagcgcctggagggaagtctggccgccaccgccgtggccgcctggcaaggggctatcctgttccgcgcccacgacgtgcaggccacccgacgggtggtcgacatggtggcatcgatccgcggggaccgtccgcccgcccgcgccgagcgcggcgtctgaccgatgccgggaaagtccttggatcccgtggcccgaaaacttgaatgagtgagtcctcactcattaccgtggttcctcgtgactcgtgccgctccactccccgccgaacaacggcgggaatccatcatcgccgcggccaggcccctcctcctggcgcacggtgatgccttcaccaccaagcaagtggcccgggcggccggcgtggccgaaggcaccatcttccgggtcttctcgtcaaagcaggacctgctcaacgcggtggtggccgatgtgctcgaccccacccccctgatcaaggccctcgacgagatgacccccgatgctgacctcgacgagcgggtgcaccacatcatcgagctgctccatcgcagcatgagcgatgtgcgcgccttcttcgccgccatccacgccatccccgcccatggcaagctgttccggggcagtacgctgtccaacccgaagaaccccgacccccaccatcccgacgcgtgcgacgacgcgggcagcgcatcacctgcccatccgccggtcgcccccgacgagcagatgcgcgcgaagcagcaacagaccgacctcgcgtcgcaggctgccgtcgaacgcgccctgtcccccttcgccgaccagctctcggtcgacctggccaccgccgcgggcttcctgcgctcggtgaccttcgcgaccatccatccgttcctcatgaacggcgcaccacccatgacccccgaccagctgagcgccctgctcctgcacggtctgaagaaggaatcctgatgctcgtaagactcatctggcgctatctgcgccattacaaggcggcggccgcgatcgtcatcgcggcccagctggtggcgaccgtctcgtcgctgctgctgccgaacctgaacgccaagatcatcgaccagggcgtctccaccggcgacaccggctacatctggcgcaccggcctgctgatgctggccatctcggtgggccagatcggcggccagatggtggcagcgttcttcggtgcgcgcctggccatgggcgtgggacgcgacatccgcgccgcgttcttcgaccgcaccctgaccttctcgcagcaggaggtgaaccgcttcggcgcccccagcctgatcacgcgcaacaccaatgacgtgcagcaggtgcagcagttgctgttgatgaccgccatcatgctcatcggcgccccgatcaccatggtgggtgcggtgttcatggcactgcgcgaggacatgggcctgtcgtggatcatcctggccgccatcgttgccctcggcgtgtgcgtcggcatcatcgtgagccgcatgagcccgctgttcggccagaaccagctgcgcctggacgccatcaaccgcgtgctgcgcgaacagctgtcgggcatccgcgtgatccgcgcattcatccgcgaaccctccgagcgcaagcgcttcaacgccgccaacaccgacatccgccagctcggttaccgcatcggcacgctgttcgccttcctgttccccgtcgtggggctggtgatgaacctgtcgtcggccgccgtgtggtggttcggcggcatgcgcgccgacaacggccaggtgcaggtgggccagctgaccgccttcatgacctacctgatgcaggtgctgatgagcgtgatgatggccacggtgatgagcatgatcgtgccgcgcgcctcgatcagcgccaagcgcatcatggacgtcttcctcaccaagtcgagcgtggtgcaggccgagcatcccgtcaccgagctcaccggcccggccgagatggacttcgaccacgtcgagttcagctatcccggcgccgaggcgcccgtgctgcacgacatctccctggaactgcgtccgggcaccaccaccgcggtgatcggctcgaccggatcgggcaagaccaccctggtgcagctcatcccgcgcctgtacgacgccaccaagggcaagatcacgatcaacggcgtggacacccgcgacctcgacatggacctgctgtggtccaagatcggcctgatcccccagaaggcctatctgttcagcggcaccgtcgcgtcgaacctgcgctacggcaagccggacgccaccgacgacgagatgtgggaggcgctgcgcgtggcgcaggccgacgacttcgtccgccagatggacggccagctcgacgcaccgatcgcccagggcggcaccaacgtgtccggcggtcagcgccagcgcctgtcgatcgcccgcgcgctggtgaagaagcccgacttctacgtgttcgacgacgccttcagcgccctcgacgtgtccaccgatgcccgcgtgcgggcagcgctggcacccaccaccaaggacgccgccgtgctcatcgtggcgcagcgcgtgtcaaccatccgccatgcggatcagatcatcgtgctcgactccggccacatcgtcggacgcggcacccatgccgaacttctggaatccagcgacacctatcgcgagatcgtcgaatcccagatgagcgcattggaggcagcatgagcgtcaccaaggacgaggactcgacagtgagtggcaagaagaacaccaacaagccggccgccaacaagaggcctgactatgcacagagcgcctcccagagccggggccccggccccggtggtggacgcgctgccgccgtggagaaggcggtgaacttcggcccgtcgctgaagcgcctgttcggcgagatgaagcccgaccgggtgctcatcgtcgtggtgatggtgctcggcgccatcggcgtggccgccaacgtctatggccccaagttgctgggcaaggcggcgaatgccgtgttcgccggcgtgatcggcaagggcctgcccgccggggtgaccaaggaccagatcgtggccgcgctcacccagcagggtaagaccgaccaggcgtcgatgatcgccaagctcgacgtgattccgggccagggcatcgacttcacccacctgggccacatcctgctgttgtgcctggcgctgtatgtcaccgcggccgtgctcaccttcatccaggcgttcatcgtgaaccgcgtggtgcagcgtgccgtgtaccgcatgcgcgaccagatcagcgccaagatcgaccggctgccgttggcctacttcgacggtcagcccgccggtgagctgctcagccgcgtgaccaatgacatggacaatgtgcagcaatcgctgcagcagaccatgtcgcaggtgatcaactcgttgctgacgctgatcggcgtgatcgccatgatgctcaccgtcagctggcagttgacgctggtcaccttgtgcatcgtgccgttgtcgttggccgtgtcgatcccgatcggcaaggcggcgcagaagcgcttcgtcggcatgtggaagtccaccggcgagctcaacgcgaaggtcgaggagtcctacaccggccatgcgctggtgaaggtgttcgggcgtcgtcgcgaggtggaggcctcgttccacgacaccaacgaggagatgtacaaggcgagcttcggggcacagttcatcagcgccctgatcatgccggccaacttcttcatcggaaacctgaacttcgtggcgatcgccgtgctcggcggcctgcgcgttgccagcggcaccatgcagctgggcgatgtgacggcgttcatccagtactcccggatgttcacccagccgctcacccagatcacctcgatgaccaacctgctgcagtcgggtgtggccagcgccgagcgcgtgttcgaggtgctggacgccggcgagcagacgcctgacgagcacggttcgctgaacctccccgtgaagggccatgtgcagttcgaccatgtggacttcagctactcggccgaccagccgctgatcaacaacctgtcgatcgaggccaagccgggtcagcagatcgccatcgtcgggcccaccggcgccggcaagaccacgctggtgaacctgctcgagcgcttctacgacgtgcagggcggcaagatcgcgatcgacggcgtggacatcgcctcggtgccccgtcaccagctgcgcgaccagctcggcatggtgttgcaggacacctggctgttcggcggcaccatccacgacaacatcgcctacggcaagatcgacgccaccgacgatgaggtgatccaggctgcgaaggccgcctatgtggatcgcttcgtgcgcaccctgcccgacggctatgagacgaagatcgacgaggagggctcgaatgtgtcggccggtgagaagcagttgctcaccattgcccgggcattcatctccgatccgtcgatcctgatcctcgatgaggccaccagctcggtggacacccgcaccgaggtgctggtgcagaaggcgatgaaccgcctgcgcagtggtcgcacgagcttcgtgatcgcccaccgcctgtcgacgatccgcgacgccgacctcatcctggtgatggagcacggcgcgatcgtcgagcagggcacccacgagggcctcatcgcggcccagggcgcctactaccgtctctacgagtcgcagttctctgcggccgagcagcccgaggagttggccggcagcgcaacgtcgggcgccaagcgcgccagcagttgagtcagcagccgctgactggttgatgcggcagatgtgacggcccggatggctcccctcgggggcctgcccgggccgttccacattgcgtggcgacgggcgtggcccgggtcacgcgggatggggaggacctttacgtcgtccaccctgcaaaagtcatccctgagtggaccgttgcgcaggataggggcggatggagcaccgtcttcagtgctttatccacccctatcctcaattcacaccccacgatgcgggcctgctgcggggcttcccgtcccgaccgtccattccatggcctctggttcccacgtcgtcctgacagtgcggacggcgtccagggcggggttgatgaaccttgcagcaaggtcgacggcatccgcaaaggtcggcgcgaccgcggcagcggaggttcccgtggccaatgactggtagcggggctcccaatggggaggcacccggaggtggcgtcccaggtccgtgttggcgcgttgctgctgcacggccagggcaagacgcaactcgcgcaggtcgacgtattgggtggcggcgatgatatcgacgtcgacgaggtccttggcgcggctgttgggccgcccgtcgggccggggcgtcatcatggtgctgaccttctcggcaagctggtcggtcagcggaaacatggcgtagggcggggagatcagtcggggacggtccggactgtccgccggccgggtgtgttcaatatgtccgaccgggggcggccccacggcaaggtcgaccgcgacattgtcgaatcgcttccccgtgtccgtgatgcaggcgaatgacaacctggcgacgaggacgccgggctgggtgacggccagaccgggacgctccgactccaactggaaccgcagatggtcccccatgtcgaccgcgacccggtgcgcgaggtcttccacggcttcatcgagggttgctcgtgtggttgacaggtcaacgtcacgggtatggcgccccgtgggtacgcgggccagcatcgcggtgccgcctttgaggagccagcctgattcaggatcggcgaatacgcgggagaggaagcggtccctgcgaatgtggtcaagatactgaccgacgctggcaccggggtggtccgcggcctgccgacgggccgcttgctggatggcactctcgacgccgaaccagtcgacgtagggcccttggcccttcatgcggccgtggctgccgggaggatgctggcgaggagctctgacccgtcaccgtcggggagcccatggtcagcagccatcggggcgagggcccgggcgacgcgttggggcgtggtcaggtgcttgtcgagggcgtcaactgtggcgtcgccgaccagagacacgtcattgtgttgcgccaggaggtctgcgatggtctgttccggcgacagggtgggcacgccgtggagcgtccgcacccgcggctggtcgacgtgcccggtgcgcagtcgcacgttttccaccgtcgtggacggatcgccggccacgatgaattcggggacggtgcgcaggaaatccccgatgccgtacagggtggcagcggtggtaccggccgctgtgaggcgccgtccgggattggacagggccagccacgtagcggtgatctcctggaagtccgttgccggagcaccacaaacccggtagacgccgcgaatcacccgctcgagtgccccggccctgctcaggcgccagatctggcgggtgtcgacaccggcagcgcgggcctgggtggcggtgacgaggccttgctggttggcggcgatccgcccgagtgtgacgaggtctgagacactactcatgtcgcgattatagccgcatatggccatactcttcctcgaagggagccgcggtcgacctgcctgacgcaaaccaggttgcctgattgacgggtcctgcacgcgggccgtcacattgggtggcgacgggcgtggctccggcaatgcgggatggggaggacctttacgtcgtccaccctgcaaaagtcctccctgagtggaccattgcgcaggataggggcggataaagcaccgtcttcggtgcctcatccgcccctatcttcgactttgcgggtcccgatggctcaggccgagcgggtgcgttccgggttgcggggacgcccgctgcgggtgcgtccactggcggtgccgccccagacggccaccacgatgccgacgaccacgcagatccacgcgggccagacctgccccaccttgtagagcccgacggcggccacgatcaggatcagggcgatcagggcctggatgatgttcttcagcttcatgggggccccttctcgacgccgggcagggtgcgaacggcgtggtcatcctgaacgttagcggtcggccggtgattcggcgaggcgatcattgcccggcacccggcggccggccgtcgtcgccgttgccgccgccctcgtcgtgtcggtcggggccgccgtctcggtcggggccgccgggagcgtccccgcccagcgcgcggatcgcgtcggagatggtggctccgcgatgggcccgacgataggccttgatgtcggcagcgctcaccccggcgggcaggccatggatgtcgtgcgggtcaccgatcacctgggtgcccatgccgagcaggccggcaccacccaccagcacgacggcgccgagcacatggcgccccatcaccagcagcacgaccccgatgatcgcgcacagcgccacgagcgccacgcggacgacacgggccacggtgcggctcttcatgcgcgggaagacctcctcgttgcctcgacgcccattgccccggacccctgccggacccaccgggcaccaccctatttggtgcggcgcatccacacgcggatgccgacgcccaccgccgtgagcatcgtccccagcagcaggccgaatcgggtcaccgggttgagcgcggcccacagcgtcgtgccgccggaagagcttccggcaccccagacctccccggcaaccatgatggccaccacgagcaccgctccgacgatgatcatcttcgtggagcccctcatggcgtgctcccggccggcgccggcagccgcgcgctcatgcgggcccccggcccagggcgatctcgtcgtcgagctcgtcgtccaggtcgggcagcacggcccgggcatcgccgccggcggccaccttgaggccgatcgccaccgcggtgagtgccgcgcccaggtagccgcagatcgacatcgcgaagtccagcacggcgagcggcagcagctccgggccgtcggggccctgacgatcagcgctggtgaagttcaggtattgcaggaatgtgacgccgcagcccagcaccaacagcacgacgccgataacgagcaacttcgttgagcccttcatggttcctccagaagtcgaggggtcttcctggaatcgttcgcccgccacccggcccgccagtcactgtgccggccgttccgccgggtcactgtgccggccgttccgccgggtcaccgtgccggccgctccgccgggccacgcggccgggccgttgcgacgcgccgtcctgaccgattggccgctccgacgggccatgggtgttctggaaggctaggcgagccgacgcccgatgtccatggttcgcgccggtcaatccaccccggcaatctcaccccgacaatcctcaccggcaatccccccggcagggcccgaccgccccgacgagcgcggcgtcggtgtgtcccggccatcctcccgaccgtcgcccggggcactccgggcgcgccggcaggggcgatgcccaccatccgcgtgcgtcaccgtgtggatatcgcacccaccccaccccgtgcgcgcctatcgtttcgcacaacaggtgtgccggctgacaaggccatacgaacccgccggccaccactgtccgccgggcccatcagcagaggagaactccgtggcgctcttgcagaacttcatcaacaaccgcttcgtcgcctcaaccagcaccgaatcattcaacctggttgatccggccaccgccgaagtcaccgggcaatcgcccgcgtcgaaccaggccgacgtcgacgccgcctacgccgccgcgaaggacgccacgcgcacctggggaaagatgatccccggcgaacgccaacgagccatgctgaaactggccgacgccatcgaggcgcacagcgacgagctggtggccgcccagagccgcaacaccggccagcccaagcacctcatcgcctccgaggaggtcacggtgggcgccgaccagatccgcttcttcgccggcgccgcccgcatcatggagggcctggcatcgggtgagtacatggagaacatgaactcggtgatccgccgcgaaccgatcggcgtcgtgggccaggtgaccccctggaactatccgctcatgatggccatctggaagatcggcccagccctggccgccggcaacacgatcgtgctgaagccctccgacaccacccccgagtccaccctgctgctggcccagttggccgccgagttcctgcccgagggcaccttcaacgtggtgctcggcagggccgccaccggtgcgatggtggtgggctcgaaggtcccgggcctggtgtcgatcaccggctcggtacgcgccggcatcgaggtggcgaaggccgccgccgagaacctcacccgctgtcacctggagctgggcggcaaggcaccgtgcatcgtcttcgatgacgccgacgtggacgctgccgccgaggcgctcaccaccgccggcttcttcaatgccggccaggactgcacctcgtccacccgcctactggtgcaggccggcgtccacgacgaattcgtggcggcactggccaagtacgcccgctccacccgcttcggcagccccgacgacgccgatgcgctctacggcccgctgaacaacgccaaccagctggcccgggtgcagcaggccgtcgattcgctgccggcccatgccgaggtggtcaccggcggcaagcaggccgaccgtccgggcttctacttcgagccgaccgtgctcgacggcctcaaccaggacgacgccctggtgcagaacgagatcttcggcccggtgctcaccgtgcagaccttcgacaccgaggaccaggccgtcgccatgggcaacggcgtgccctacggactcgcctcgtcggtctggacgcgcgaccatgcgcgggcgctgcggatgtcggccgcgctcgacttcgggtgcgtgtggatcaactgccacatcccgctggtcgccgagatgccccacggcggcttcaagtcgtcgggctacggcaaggacctgtcgaagtactccgtggaggagtacacccgcgtcaagcacgtgatgagctcgatggagtaaccgctggacgcaccactcggccccatcctgctcatgcggggtggggccgagctgcgtcaccacccacgcacccttggcaggtgcccgccaggtacccaccatgtgcccacaacgcccgccacgacacgaaggaggccgccccctgatggggacggcctccttcatcgttcatccggccatgtcaccggctgtccggcgccggacacggccagaacatctcacacgccgtaccggcgccctgttgttcttacacgccgtaccggcgcttggccttctcaatggccgacacataacccgaacgctcatactccgaggccgaggcgtcggagggaacggccagcatgccacgcagctggtcgagcgtcaggtcgctgcgccgcaggtagtcgcgcaggccgtcgatgaggcgacccgcataggcggcaccgtggcgcaccagcgccgaggtggtcatcacgacgtcggcaccggccagcaggcccttgacgatgtcgtcgcgcgtctccacgccacccgacaccgccaacgacgacttgaccttgccactcagcacggctgcccaggtgcgcggcaggcgtccgatctcgggcgacgacagctcgaagccggacacgacctcgcgcttgttcacatcgatgtcgggctgcaggaagcggttgaacatcaccaggccatcggcgccggcgtcgcacagggacgtggccacctcaccgaagctgctgaagtacggcgacagcttcacggccaccgggatgttcacgacgtccttcaccgcacgcaggatctcgacgtggcggtcctcgacctcacggccggtgatcgacgtatcgccgggaaccaggtagatgttcagctcgatggctgacgcacctgcgtcctgcatgcgacgggcctctgcggtccacgtgccgccactggcaccgttgaggctgccgatcagcggaatctcgagcgccttggcgccgtcctccagcacctgcaggtactggctcgacagcgtcgcacccaccgaggcgatcgcggtgaccgggaaatagctgagcgcttcggcgaagctctccgactgctcctcggtctgctggacgatctgctcgctctcgtagcgcagctgctcctcgaacaacgagtgcatcaccaccgcacccacgccggcgtcctcgagcgtcttgatcgagtcgacggtctgggcgagcggaccggccgaggccaccaccgggttgcgcagcggcaagcccatgtagttcgagctcaggtcggtggtgttgggcaccgtcacctgggcgttcacctcgcgcggggccatcagctggtcggtggtggcattgcccgccaccgacttcgccgcggccgaggccgcagcagcggccagtgcgtcacttccgtagttgatcgacatctcagacatccctccgtgcgtcggtggcgaacatctcggccggacgtgaggccatttcctcgtagtcggcgaaacgcctggtcacctgctcctggctgaggtcattgaggcgcttggcctcttccggatccttgaccatcagcatcttgaagcgcagctcggtcttgcggtagtccatcagcgagatgcgcggacgggccgagtcgagcaggaacgggttaccacccgagtcgcgaacctccgggttgtaccggatcagcggccagtgaccggaggccactgccttgtactgctggtccaggcccttgcgcaggttgtagccatggctgatgcagtggctgtaggcgatgatcaggctggggccggggtaggcctcggcctcacggaacgccttcagcgtctgctccgggtcggcaccgaacgccacgcgggcgacatagacgtcgccgtaggacacggcctgcatggcgatgtccttcttgttcgtgcgcttgccggcggtcgcgaacttcgcgatcgcgcccatgggcgacgacttcgaggcctggccaccggtattggagtagacctcggtgtcgagcaccagcacattgacattgcgtccggtggacagcacatggtcaaggccgcccgaaccgatgtcgtaggcccaaccgtcgccaccgacgatccacacggaacgacgcagcaggttgtcggccaccgaccgcaggtcctcgaccttggccttggtgtcggcgtccacgttcggatcgttgaccaggtcggtcaggcgatcctgcagggcgtcgacgcgctcggcctgggcgtgcagatcggactcctgcgcctgcggggcgttcagcagctgatcgaccagctcggggtcgttgatcgcctcggacagctcgtcaacgcgctgacgggccagttcgttgtgcaggtcggccgccagacgcatgccaaggccgaactcggcgttgtcctcgaacaatgagttgctccaggccgggccgcgtccctccttgttcttcgcccacggggtggtcggcaggttgccgccgtagatggacgagcagccggtggcattcgccacggtggcgcggtcgccgaacagctgggtgagcagcttgaggtacggcgtctcgccacatcccgggcaggcaccgctgaactcgaacagcggctgcaggaactgggcgccacgcacggcaccgtagttcacgcgggtgcgcgggggctcggggatcttctggaagaactccacgttcgcccgctcgttggtgcggtcgagcacggaatccaggttgatcgccttgcgctcggggtcgccaccgatgggatgcacggggcaggcctcgacgcacaggccacaaccggtgcagtcctcggcgaacacctgcagggtgtacatctcgtcgggcaggccggccgcgttcagcggaaccgcctggaacgacttcggcgcatcgtcgagcacatcgggcttgtagtacttggccctcagcacgccgtgcgggcagacgaaggcgcagttgccgcactggatgcagttgtcctggtcccagaccgcgatgatctcggacacattgcgcttctcgtactgcgtggtgcccggggggaacgaaccatcggccggcagcttgctcaccggcagcgactcgccctgctcggtcatcatggccgcggtgacgtccttgacgaagtcaggcgcgaacgacggcacgggcggcaggtagtcctcggtggaggtgaccttggccggcacgtcgatcttgtgcaggtgctccagggcggcgtcgacggcggcgtggttcttctccacgatctccatcgacttcttcgcgtaggtcttggtgatcgagttcttgatggcctcgatcgcgtggtcctcgggaagcacgccactgatcttgaagtagcaggtctgcagcaccgtgttggtgcggttgcccaggcccaccgaacgggccacctcaccggcatcgatcgcatacacctgcaggtcgaggtcgatgatcttcttctgcatcggggccggcagatggccccagacgtcctcggcggggtacgggctgttgatcagcaccgtggtgcccttgcgggcgaacgccagcacgtcgatgcgctcaaggtcggcccagtggtgcacgccgatgaagccggcctggttgaccaggtagggggccttgatcggatcgggtccgaagcgaaggtgcgaggtggtgcggccgccggacttcttcgagtcgtagacgaagtagccctgcgcgtaggtgcccggctcggagccgaggatcttgatggtgttcttgttggcgccgacggtgccgtcagcaccgatgccgtagaacactgcacgcgaggtctcggggtcctccaggtcgagcgaggcgtcccacgggatcgacaggtgcgtcacatcgtcggtgatgccgacggtgaagcgacgcttcggcttgtccttggcgagctcgtcgtacacggcggcgcacatgcccggcgtgaactccttgctcgacaggccgtagcggccaccgatgatggcgggcaggttgtcgcgctcgccgttcgaataggcctcggagactgccgagaccacgtcgaggaacagcggctcaccgttggagcccggctccttggtgcggtcgagcacggcgatcttcttgaccgatgcgggaatgcagtccagcacggcctgcgtcgggaacggacggtacaggcggatgaccaccaggccgaccttctcgccctgctcattgagcttgctgacggtctgctgcacggtctcggcacccgagcccatgatcacgatgacgcgatcggcgtcgggcgcgccgtagtagtcggccaggtggtactgacggccggtcatggcggcgaactcgtccatcgcgtcctgcacgatgcccggaaccgagtcgtagtacttgttgccggcctcgcggccctggaagtacacgtcggcgttctgggcggtgccacggatgaacgggttgtcgggcgacagggcccgctcgcggtgctcgcgcacgagcgcatcgggcaccatcgaacgcagctggtcgtcggtgagctggatgcaggtgttgagctcatggctggtgcggaagccgtcgaagaagtgcatgaacggcacgcgcgaacgcagcgtggcgacctgggagatcagggcgttgtcatggcactgctgcacgccggtggagcacagcatcgcccaaccggtctggcgacaggccatcacgtcctggtggtcaccgaagatcgacaggccctgggtggccagcgagcgcgcggcgacgtgcatcaccgtggaggtgagctcaccggcgatcttgtacatgttcgggatcatcagcagcaggccctgcgacgccgtgaaggtggtcgccagggcgccgccctgcagggagccgtgcatggcaccggccgcgccggcctccgactgcatctccatcacatggggcacctggccccagatgttcatgcggtcgcgggcactccactcgtcggccagttcggccatcggggagctcggcgtgatcgggtagatcgagcacagctcattgatgcggaaggccacatcagaggcggcggtgttgccgtcgcagatcatctgatgggtgatgtcctgctcgcgtcgtgactgggccagctcatcggcagcgtccttggcgccggcagcgacgtcaacgggtgacggggttgcggtggcggcctcgccgctcagacctggattggcgggcatgccattcgagccgggaaccggcccacgggtagttgtagtcatattgctcacttctccggaatcatctcgatggcatgcaccgggcactgctcgaagcaggtgccacagccggtgcacttgtcatagtcgaagcggtagcgatgtcccttgccgagcttcacgattgcgtcttcggggcacgagccgtagcagccgtcgcactcgaagcagttgccacacgacaggcagcgcgtggcctcgaagatggcctcatccgcggacaggcccttcacgacctcatcgaaatcgctcacgcgggcggccgggtcgagctcgggctgcacctcacgcgggtgatctccgaagtaccacaggtgcaggtcgtcgaagtgcacgatggggtgcttcaccttggtctgcgggttctggtggttcaaccaggtgtcgatctgcttggcggcacgcttgccgtggccgacgcccaccgtgacggtgcgctcggagggaacggcgtcgccaccggcaaagatgccgggaacgtcggtcatcagcgtggtgggatcaaccttcaccacgtcaccgttgaactgcatgccggggatgtcgtgcaggaagccggtgtcggcaacctggccgacggccatgatcacggtgtcggtggccagcgtctcgtacttgccggtgccgtggggcttgccatccttgtcgagctccatgatctcgaccttgatgtcaccgccctgctgcatctcgttgatggtgcgcagccagtgcacctcgacgccctcgcgctccgcttcctcgagctcctccttgtgggcgggcatctcgttctcggtgcgccggtagatgatcacggcgtcctcggcgcccaggcggcgggcggtacgcgcggcgtccatggcggtattgccaccgccgtagacggcgacgcggcggccgatgaccggcttgtcgccgctggcgacgttgcgcaggaagtcaacggcgtcgaccatgtggccggcgtccatgctggggatctccacgcgacgcgacaggtgcgcgccgacggccacgaagaccgcatcgaaatggcccgacttctgctcggcgaccaggtccttgacgttgtggttgagctcgatcttcaccccgaggctctcgacgcgcttgatctcggcgtcgacgacgtcgcgcggaaggcggtactcggggatgccgtagcgcatcatgccgccggcctgattgccggcgtcgtggatctccacctcatggcccagacgggccaggtggtaagccgcggacaatcccgcggggccggcgccgatcacgaggatgcggaagccggagttgttgcggggcttgtcgaagccccagcccttctcgatagctaggtcacccaggtagcgctccaccgagtggatggagaccgccgaatcgaggtcgccgcggttgcaggcggtctcgcaggggtggtagcacacgcgaccgtgaatggcggggaacgggttgtcgcgcacgagctgacgccatgcggactccgggtccgtttccttgaccagccgcagccactcctggcaattctcgcccgctgggcaagcgttgttacaggggggcaacaggtcaacatagatgggcatccgcgtgcgcaccggcccaacgcgaccttctccggtcgtgaggtcgggcaactgcgtgatgtcgcgacgttcaggtgacatggaaagaccttttcctctacctcgtctgtgcgttgcctccggacggaggcagttgtctgatccagccccgcagctgctgtgccgcaggacgattcagccttgtgtcagattggtcccaccaatcccacacaaggccgatgttactcatggatctggcctgcgcctaggcgaggttccaaatacggactgttttggtcggaaatcccccgacacgcctgcagacgagcccgcacgctgaccgattgtcctgtcaacgcaggcgcagcgacgccctgcaacaggagatgctgctgcagggcgtcggtgaccagatcggggtgcggactacttggattcgtccaacttcgccagggcggcgtcgaggcgctccaccttgccggtgagctcgccggtgtggcccggacggatgtctgccttcagcaccagggagaccctcggtgcaactttttccacggctgcgcaggaatcgtgcacgacgcgcatacactcgtcccagctgccttcaatggtggtgaacatggagttggtctcattggggagtccggaatcccggacgaccttgacggctgcggccaccgcgtcgtggacagagccgtcggggttgtcattacccatggggctgattgtgaacgctacgagcatgtggccagcctagggctagttcacggtgcccgcagcgacaatttcattggctgaccgatccgcggatcgactgcacacgcccccgcctgacgtggtgaccatccaccaccgaaggacctctgcccccagatgctcgcagtcccaccccgttttgacggaccggccagtaactcaacgagttagaacgagtcaaggggcgaatgatgactacttacgatgccaccggcatgctgatcatctcggtggcaatccgcgagatccggcgcgtcggataccgcaacctgtcgttgcgggaactggcggcgcgagccggcatgaccaccggggcgctgtaccgacgtttctcgggcaaggacgagttgttggcggccgccgccgcgtcggtgggccaacagatcgtcgaggaggcccaggccaggatggccggcctcacgccaacgccacatgagcgcctggtgctgctgggcgaggtgatgttgaaccgcttcgagaaggaccgggagctgatggacttcctgttctccgcactgcccgtgggacgtttctggcagggcgtcaccaaacccgaccgcagctcgccgctgttggcactcaccctggacaccctcgatgcgctgttcggtgagaacgtcgaccacgagcgccagcgggagctgttcgtgaaggccagcgccttcatgcagggctacgggctgctgatcgccagcggagcggtgccctatgagcgccagatcttcgccagcgccatgacggccttcgcacagcaggccggcgccctcgaagtggccgacgcggtgaaggaactctacgtgcagcaacctgcctgaccggcgggtgtggccacggtcagccggacaggcgtccccggcccatcggggggcgacgcccgggctgcccgcggccaccggcggccggttccggtcgcgcagccgcggtcaccgggtggttcgggtggccgactgcccaaccaatccgagcgggcatccaacttccctggagcccaacagccctctggagcccggcggccctctgtacctcagcggccctctgtaccccaacaacccgtgtaccccagcaacccgtgcccgggccatcccgtgcccggataacccgggcgccccagcccccggaacccaaccaccgggcgacccgaccatcaggggaacctgcgcttgattcccccggtcatcgctctaggctcaggcagaatcgccggttgcggccgcctttcacgcgcccccggcgcggtgccagcatccccgatgaacacgagcctgaccatgaacgattcccgtgccatccccgaccatgacgcgacggccaaccccggccgctcccagcgcagtgccaaccccggccgctcccagcgcgggggccaactgagcggactgcgcggcgagctgacggccgtgatcaccggcggcgtcatgccgatcatggactccacgatcgtggccatcggcatgccgaacctgatcgccgccttccactcgaacgccgccaccatgcaatgggtgtccaccggctacctgctcggactggccgtgaccgtgcccatcatgggctggctccaggcacgcctgggtgggcgctccctgtggatcgcgggcctggtggtcttcctggccgggtcggtggcctgcgccctgtcgtggaatgagatcagcctgatcgccttccgggtgggccagggcatggcggccggcatgctcatgacgctgatgcagacccttccggtgcaggaggcccgtcggcacggcatcgagcagatcggcagcctcatctcggtgatctcggtgccggtggccaccggtccgatcctcggtccggtgctcggcgggctggtgctgcactggggcagctggcactggttgttcctgatcaacgtgccgatcggcctggtcgccatcgtcttcgccctcctgtggatgccgcgcgacggtggcaccccggagggcaccacgccgcgtcagagcttcgacccgctgggcttcgtgctcgtctccggcgggctggtggcgatcctgctggccctcaccaatgtggccaccgacggcggcttcgggcatcgcagcgtgctcctgccgctggggttgggcgtcgtgatgctggcggcgttcctggccgagccgcgcacccgcgatccacgtcgggccctcatcgacatctccctgatgcgctatcgctcggtggcctccggcgcggcgtcctatttcctggccggcggcgccatgtatgccgcgcagttcctgttgccgatgttctggcagcagctgcggggccacagcgtgctggccgcagcgctcctgctggtgccgcagggcattggttcgttgctgagccgcctggtggccggtcccctgaccgaccgcatcggcagccggacggtggccactgcgggcttcttcctggtggcgctcatgacgctgccgttcgccttcgtctcggccagcacctccgatgcattgttgtcggggctgttgttcttccgtggcctggcgctgggcatcctgttcatcccggtgatgctggccgcctacctcgacatcccggcctccgcggtggccaatgccacgatcatcacccgcgtggcgcagcaggtgggcgcgtcattcggcacggcggtggtggccgtggtgctcgaggcttcgctgcgcaccggcggcgtcgacgggtcgggcgccttccaccaggcattctgggccaccatcgcgatcacggtggccggcggcgtggttgcgttgtggctcccgggaaggcaggggcttcctggaagggaggggctcccggcaacacaagagcccccggggaaacagggatcccctgaaggccaagggtccccggggaaacagggatccccagaagaccgcgcccttcgggatggccaggaccttctggatggccacgcggccccgggtgggccggagccgtcggggcacctgcagccacccgacgaaccgggatcgtccgaccggtaggcgtccgacaccgacgatgccggcccgggcgccacgcacagcccagccagcgcgagccccaccgcgccagcaacgctgacgggctagcgtcgcaggtaggacgcgagaatcaacacgccggcaagcaaggagcgatgatggcggtattcacacccgagcagcagctacggatcctgtcggacctggtggccatccagtcagcgaacgaccatgagctgcaggtggcgaactacctggcgaagctgctgggcgaccacgggatcaccgccacggtgctgccggccgagcccgacgcagaccacaagcaggccgaacccgaccgggccaacctggtggccgagatcggttcgggcgcaccggtgctggcgctgtcggggcacatggacaccgtgagcgttggcgatgccgacgcatggacgtccggccccttcacggtgaccgaacgcgacgggctgctccagggtcgcgggaccaccgacatgaaggcgggcctggcggcgatggtgatcgcgatgatcgagctcaaggcgcagggcctgccccgcaaggggacgctgcgcctgctcgccagccgtgccgaggaggtcggcgaatacggtgccaaggaactggcccgggccggctatatgcgcgacgcggatgcgttggtggtcggcgaaccatcgggatggaacatcatctacacgcacaagggctcggtcgacttccggctgcgttcgcagggcaccgcggcgcacagctcgatgcccgaggccgggttcaacgcgattcctccgctgatggaggtgttggtgcgcgcgcagcaggagttcaatgccagcccggcgtccgacccggtgctcggcgagctgaccttcagcaccaccgtgttccacggcggcgaccaggtgaacacgatcccggacgcggcggtggccgaggtgaatgtgcgcacgattccgcagttcgacaacgatgaggcgatcgccctgctcaagggcctggtgggcgagcagaaccggcgcggtgcccggatctcgctcgacccctatatgcaggaacccgtggtgcaggctccccgggactcactactcgtgcggcttgccaccaagctcggcgagcgcatcagcggcgtgacgaccccggtggtcggcgtggccgccgtcacggacgcgtccagcctgctcaagggcaagggacccgacttccccttcatgatgttcgggcccggcaacgagacgatgcacaccgtcaacgagaacatcgacaagcagatgtacctcgatttcgtgcagctgtaccagcgcctgttcgtggaatacctcggccaggccggctgaccgcaacgggccgggtggcagatcgagctggtcgccggccgggggcaaccgggtgggcacggtcccgccccgcacctgagtgggcacctgtgcgggaatgacgccgcacaactgcccacctaacgaggattcacggccacccgaggggtcccggccggcgtttacgccgacatcctgaaggcccgaacggaacagccgcccccggaaagcccgcgccaggacgccccaacccacgacgacccacccggggccgggcgcagtcccgccgctgggcgcgcagacccgcccctgagtgggcacctgtgcgggaatgacgccgcacaactgcccacctaaaggggattcgcggccacccgaagggggatcggcccgcatggacgtcgatcaggacgtcagtcaggacgccgctcagcccccgggcgaccggacccggcctcacacccggcgctggcggggaaacagaagataggggcggataaagcaccgtagacggtgctttatccgcccctatcctgcgggtctgtcggtggacgtggactcaggcccggtagtcgtcaaggtcgaggcgcgacggtgcggcctccatcagctccggatcgtgggtgatcacgacgacggcggccttgtcgacggccgaccacacatcgtccatcagggcctcggcggtctccgagtccaggtgctcggtgggttcgtcgaggatcaccagttggtcgttgcgtccacccaccaggatgcgcgccatcgcaatgcggcgcgcctcgccgcccgacagggtggcgccctcctcacccaccacgcgggcgggatccatggtggcaaggcccgccttggacagggcctgcgccacttgggcatcggtggcgtccttgtcgccgatgcgcacgttctcggccaccgaggtggcaaagatgtgcgcgtcctgcgcaaggtagccgatggccgccggagactgcacggtgccggcgatcgggtcgatgaggcccatcacggtggccgccagggtggtcttgccgacgcccgaggcgccggtgatcgccacccgctcccccggcccgacgcgaaggttgacgcccttgatcaccgcgccatgcccgggccagccggccgcaaggttgctgagcaccagttcacccggcggggtgccagcaccagcgacggcgccgccagcgctcgggacagccggctgggggacatccgcccttgtcgagggggcacctgtctgcggcgtacctgttgcctgcggggcacctgttgcctccggcacgctgcgatcgcccttgccgaccggaggctcacgcagcagcgcgatcacccgccgcagggcggcacgcgccctggtcatcgtctgggcggcggtggtcagatcggacaggctctcgtgcagcgcaagcggcgtcagcaccaggatcgccaggtcgcgtcccagcagctggccaccggcgaccgagggaccgcccacgagcaggccgcccaccacggccaggccgctgctgagcatctgcccggcgctggcgatgccgcgcgtccaggcgtcgcgcgcctcggcgtcgcgcagcctgatgtcggtggcgcgcatccggtcgagctgggccccgtcggcgccgaaggccaccaggtcgggagcacaacgggcaagctggcgcacctcgtcggccagcgcgccacgcagcggcacggcggcctcgtccgcacggcgcgagagccgctgacccagccagggcagcccgatgcccgcaatgaggctggtgagcaacaggatcacggccgccccgggcgagaagaacgcgatgagcacgctggtgaggccgatcaccagcacggagctgacgaagggcaccacgatgcgcaccaccacgtccatcacggcatcgacgtcggcggtcacgcgcaccagcaggtcgccctggtggcggcccagcaaggtggtgcgggcgagcttggcatagacggtctcccgcagcgaaccctccatgcgcagcgcgaggtcgtgacccacgagtcgctcggcgtagcggaagacgccgcgtccgatgccgaagaagcgcacgccgacgctggctgccagcaggtacagcaccgggggatgttcggcggcgcggctgagcagccagccggacagcgccatcaatcccaccgatgaaccggtggcgcagacggccaggatgatgctggtgaccagtcggcgcgtgccatgcggaatgccgcggatgagctggcgcaccagggcgctggtctgaccgggcgcgctctcggcctcgaggcccttggcgctcgccggccggtcgggccgggcctctgcgacgtggggcagcaccgagctggggtattggtcctcgcccagcaggaagtctgcggaatcacccgactcggtggaccagacgcgatgctgcttgcgggcctcgcgcttcgacagtttgctcggggacgtcgctgcttgcccgggcgcgggacctgcgggcgcactgaccccacgcggtgtcgtgccccgcttgacgtccgacggctccccagcggtcgaactcagcgcgtggacggccgctgcggcggcccgggcgttcccactcgtgcgtgaatcagttgcgcgggaatcatccggacggtggtcggagccgtctgccggttcggcggcgggcgccacgacgtcaaccacctggtcggccatggcgatgacggccgggcggtggctcaccaccagggccgaggccccggaggcccgcacggccctgatcgcgatcgcctcggtggactggtcgaggcccgcagtcggttcgtcgagcaccagcaggcgggcaccgcccagctcgatgcgcagcagggccctggcgagcgccacgcggcgtcgctcccccgaggacaggccctccccctcgtcagctaccacgtggtcgagcgcgaggttgcgtccaccggcacggtcgagggcgtcgcgcaactgggcatcggtggcatccgggtgccccatccgcacattgtcggcgacggtgccgttgaccatgcccgggtcctgcgacacataggcgatgtggtggcgccagtcggccatgttgacctcggcaaggtcctgatcgccgacgcggacctggccggaggtggccggctggaagcccatcagcactgacagcgcggtggacttgccgccaccggaggtgccgcgcagcaccacgacctcgccggggcgcacccggcacgagaacccggacagtgccgggcggtcggtgcccggatagcgcacggacaggtcgttgaagctgatcgtcgccgcggcgggatcgggggcgggcgcgtcgccgccgatgtgggtggcctcggccgcctcgatcagctcgaaggccttgtcggcggcagcagtgccgtcggcagaatcatggaagtgaacgcccacctgccgaatcggcaggtagacctcgggggtgaggatcagcacgaacagggaagtgcgcaggtcgaagtggccggccaccacgcggaagcccatgctcactgccaccagggccaccgacagcgtcgacagcagctcgaggacgaatgaggacaggaaggccagtcgcagcgtcttcatggtctcggtgcggtgcgccgcctcggtgcgtcgcaggcccacgagctgggcgcgggcccggccgaacacctgcagcgtcggcagtccggccaccaggtcggcgaagtggttggccaggcgcgtctccacggcgaagcggcggtcgacctgcttctgggtggccatgccgatcagggccatgaacagggggatgagtggcaccgtgatcgcgatgatgatggtggactcgaggtcctgggtgaggatcgccacgcccaccacgagcggcacgcccacggccatcatgagttgcggcaggtacttggagaaatagccgtccagcgagtccagcccctgggtgaccagggtgatcagcgtgccggtgggcgtggacgcgtcggtggggcgcgccaggcgtgccgtcatcacatcggtgcgcaactgcgacttcacggcagccgacgcgcggtgcgccagccattggttgagccagttgagccccgcgcgcgccacgaagacggccatcaacaggccgcaggcggccagcacgccgtcggtgttgtgggtgtcgaagacgtgcgcgacggcgtcggagatcagccgcgcctgggccagcaccaggaaggccgtggcgacgccgacaagggcgactgccaccaggaatcccctggtggcagtcgccctcttgaccagtcgcgggtcgagcggcccggccactcaaaccctcaacattgtggtgatcacacgtgcacctcggccacattcggctcatgctcgtgctcgggcatctccttggtggacaggcgcttgctgaacacccagtagctccatgcctggtaggccagcacgaccggcaccaggaagcaggcaaaccacgtcataagcttcagggtgagcggcgagctcgacgcggtgaccatattgagcgggttgctcatgtcagccgagatgaagccgagcgtgccgtacatcttgacgaagatcatggccagcatcagcaggatcgaggcgccggtgccgatgaacgcccagccattgcgctcggcgcgctgcgccagggcagccaggccgagcaccacgacggacagcaggccggcggcccacatcagcacggtggacagcgaacccaggtaggggttcttgctcgtgccgtagaagatgttggcggccagcacgaagatcagtagcacggccacggtgaccggggccagcgtgtgcacgaacttgacggtcttgtcgtggatcgagccataggtcttcagtgccaggaacatcgagccgtgggtgcagaacagcaggatgaacagcacgccgccgagcaggccgaaggggctgaacagcgcccagaagccgccggtgtacaggttgggctcgccgaatgctgcgctcgtcaggggggcgacgtccatgcccttgacgaagttggcgaagccgatgccgaacacgagcgagacgatcagcgaaccgatcgaggcgcaggcgtcgaaggcattgcgccaacggtcgtcgggcatcttggcgcggtattcgaacgagatgcctcgcaggatcagccccaccagcaccaggaacagcggcaggtacaggccgctgaacagggttgcgtaccagccggggaaggccgcgaaggtggcgccaccagcggtgatcagccagacctcattgccgtcccaggtgggtccgatcgtgttgatcatcacccggcgttccttgggatccttgccgaggatgggatacagcatcgagacgccgaagtcgaagccctcaaggaagaagaagccgatccacagcaccgcgatgagcaggaaccacacaatctgcagcggcgacgcgtccaggctcgcctgcagcggaataagagaattcgtgagcatgtctatgtctccagcctcagtacgcgaaggacagtggggcgtcgtcggtcggcttctccaccttcaccagcgcggggagtccttccttgatcgtcttgatgaacagcttcagcacgatgaccgccacgaccgcgtacaccagcgtgtacaggatcatcgtcagccacatggcgccggcaccgttgcccggtgaggcggccgtccaggtgggcaatacgccattgacgatccatggctgccgcccgagctcggtgaggatccagccgaaggagttggcgaacagcggcatgaacggcaggcaggccatcagcacggcgtagaacttgccgccctttggcaggtgatcgcggcgggtctgcaccagcgtggcgatgccgatgatgaaggccagcacgccgagcccgatcatgagccggaagctgtagtagttgaccatcacattcggcaccggatcgaccggcatggccttcagttcgtcggcgaactgcgactgcagggcgttctgcgtgccgttgtcggtggcgtagccctcctgcaggtaggactcacgcaggtcctggatgccctggaccttggcgttcggatcgttcttggccaggatgctcaacacaccgggcacgtccaggctgaagaccttgtggtacgtcttgtcctggccggatccctcggtggtgatgatggcgaccaccgagaacggggcgctctcctgggtctcgagcaggccctctgcggcggccagcttcatcggctggtattcagcctcgaccttgccctggaagtcaccggagatgaaggtgaccagcgaggccaggatgagcacccaggcggagaaacgtgccgacttgcgccacgtggaggtgtccagcgaatcggccggctgggcgtcgcgacgcttcttggcgagccaccagccggagacgccgagcagcaatgcaccggcggtcatgaacgcagcaccgatggtgtgcgggagggtggcgaggaacaccgggttggtgatcagcgccaggaagtcggacagctcagcgcgaccggtggctgcgttgtagacggcacccacggggttctgcatccaggagttggcagccaggatgaagatcgacgagatgaagctgccgagcgcggtgagccagatggtggccaggtgcaggcccttgggaagccgattccagccgaagatccacaggccgacgaacgtcgactcgaggaagaaggcgatcagggcctcgagggccagcggggcgccgaagatgtcgcccacgaaccgggagtactcagaccagttcatcccgaactggaactcctgcacgatgcccgtcacgacaccggccgcgaagttgatcaggaagagcttgccgaagaacttcaccaggcgaagccactggtcattgcccgaacgcacccacagcgtctgaaggatcgccagaagccatgtgatgccgagcgtaatcggcacaaagaagtagtgatagacggtggtgatgccgaactgccaccgcgctagtacctgagcgtccatagccgcaacctactgcggagacagggtgtatcgcatccttcgcgcacagaaacggaccaaaaacggaccaaatcggtccagatctcggccgcccgcaagcatacaagacgttcttgggggcctcgtaggggggggtctatgtagcggcgatgcgctcaaatctcggccggaccgacgccgatttcgcctgcagcgaacatgggccgggtaaccctcgatccacgctcgaaacaggaaccgcggcaccgtggtcgtcaggggaaaaccggggcacgatggcttccggtcgcaaggcgggggtccccggaatcagaccgcttcgcttgcggtgcgcgcacccccacgcgacgcacccggggggctcactcaggacgctgcaccaggtgcgtctgaggctccacgaacagcgcctgcggccacgggtagcgccgcgcgcgatcgaccacgtcctgccagggcagctcgccaccggccgcccgcaggtaatggccgaacagctcggcggtggcccgggcatcgcccagtgccgaatgcgcatcgcgcaacgagacgcccgccgcctcacagcaatcgaccagccgacggctgcgggcatgcaggaagcgggtggactggcgcatcgtgcacaccgagggaatcggctcgggcggaatcgtcatgccggcggtacgcagctcggcggtgaggaagcccacgtcgaacgacgaattgtgcgccaccaccacccggtcacgcagcttgtcgacgagcccgggggccagctcggccattgtgggggccgccgcgacatccgccgaggtgatgtggtgcacgcgcgtggcgcgcaccgtgcgccggggattcaccagcgtggaccactcgtcgtccacatggccctgcgggtcaaggcgcaccaggccgatctcgatgatgcgatcgccccgggcgggcgagaagcctgtggtctcgaggtccagcactgcgtatccggccatgatctcgattgtgacacgcgcctgtgacaaaaccgacgtccggcgaccgtcgcagaccccgcccgatcacgggtcggtgaaccatgaacccggggccacgaacacggggccttgaacacggggccaggaatcctgcgccgtaggcttcgcacatgcgcacgatgaccgtttcccaatcgctgacggcggcccacgagttggcgaagcacggtgaacggcatctgctgggcctcaccggcgagcccggcgtcggcaagtcgaccctggcagcactgcttgccgccgacctcggcgccgccgcggtggccgtgtcgatggatggcttccacctcgcccagaaggagctcgaacggctcgggcgcgccagccggaagggagcgcccgacaccttcgactcgtggggcttcctgtcgctgatgcagcggctcaccaccaatgacgccccggctgtctatgcgcccgaataccaccgggaactgcacaaccccgtggcgggtgccatccgcgtggacaagcacgtgccgctggtgatcgccgagggcaactacctgctgctgcccggacgcccctggggcctggcccacgacatgttcgacgagatctggttcctgcagaccaaccaggacctgcgccacaagcgcctcatcaaccgccacatggccttcggcaagaccgcccagcacgccgaacggtggacgctgggtcccgacgagcgcaacgcccgcaccgtgcgcgcccagatcggccgggccgatgcggtgatcgaactcagctgagcgcaccggatcgtccaggaaggcactgcccggtggacgcccggccggccggcccgcgcataggctggcgtgcatgactaatccgaacaagcccgaggtcacgctgcccgatgaggcgcccgacgacctggtgatcgaagacatcgtggagggcaccggccccgaggcgaaggccggcgacctggtggacgtgcactatgtgggcgtggccctgagcaacggccaggaattcgattccagctacggccgtggcgaaccgctcagcttccagctgggtgtcggccaggtgatcagcggatgggacaacggcgtgcagggcatgaaggtcggtggccgacgccgcctcgtgatccccccgcagctcggctacggcgcccgcggcgccggtggcgtgatcaagcccaatgagacgctcgtgttcgtctgcgacctggtgggcatccactaactgcaagccccctgcgtctgcaagcccactgcgtctgcaaacccgcggcgtgatccggagaacccggaacaccgcggggatgacaagggccgggtccgaaggaaaaccttcggacccggcccttgttgctgccctttcagggattccccgtgcgggggaaggcccttatgcctcgacgggatgctccacgatgcgcagcgcaccggaggggcagcgcgagatgacatcgcgcaggtgctgtgccagctcaggggtgtcagccaccgtcggattgatccagggacgcttgtcgatgtcgaagacctcgggcatgccgcgtacgcactccgcagcgtgccggcagacctcgccgtcgaaggtcacgccgacctcggggccggtgtatgtcttgtgggccataagtcactccttgttgttctgttgatgctccatggggatcgggcccgactcctcagcacgggtccgatcgacgccgctcagcccggcgtcagtccttcacattggacggcttggcgcggtacacgaggtccttgtaatcggggtgacgcaggatccagcccttgatgaaggggcacagcggcaggaccgaacgcgaaccatcgtcgcggacgtcgtccagcgcgaagcgggcgatcttgctgcccacgccctggccctcgaagttgggctccacctcggtgtgggtgaacacgatgagcttgtcacccgacaacatgtactcggcgaagccggcgagatcgccgtcgatatgtgcttcgtagcgtccctgcttcgggttgttctcaacgttgacagtgctcacggtgcctctttggcaacacgggggggctccccggaggggaggccccgacagataacaccatcctacttgtgaaacacaagggggaatgcgtcaagcgcagactgtcgtggggccgcttcgcagccagcacaacgcggggcccccactgccttcggcaagggctgcgacgagggctgcggacgagtgcccgggcgcgcactcaggccgaggccacgacccgctcgacgcggcgatcgggaatcacccacagcaggccggtgagcatgtacatggcgatcgccacgcccactcccaggtgcgtcggcaggtagtcggccccggcggccgcggcgatgccgatgccgtacaggatgggcgaccagaagcccttgcgatcgtcgcccagcgcttggttgagcagcgactcggagggctggctgcgcaccagcgtgcgcgacaacagccagtacgacaacgccgccagcaagaggtcgacgccgtagatcagcaccggcacgcgcgacaggtcggaggcgtccatccagtccgtggtcatcggcagcagcgacaaccagaacaacaggttcaggttggcccacagcacggggccgttgaccttctcgaccagctggaacaggtggtggtggttggtccagtagatgcccacataggcgaagctcaggacataggtgaggaagccaggccggtgctgtgcagcaggtctgagaagccgtcgccctcgggggtgtgcagctccaacaccatgatcgtgatgatgatggccagtacgccgtcgctgaacgcctctagacgcgagctattcacagtgcaattgtgtcacgcggcattcgggcgacccgccgttggtctcacgcgcggcgcacgccggcccccagcggcttcccggcgccgcccgcgcgtcgaaacggccgacgatcactggtgcgcgtcggcgatcacccgctccacgcgccggtcgggcaccacccacagcacggccgtcacgacgtacatcgcgatggcgatgccgacgcccacatgggccggcaggaagccggcgcaggccgccgccgccaggccgatgccgaagacgaccatcgaccactgtgacttgtgcaccgtgcgcagcgcccggttgagccgcgatccggccggttggcgacgccgcagcatggcaatgagtgccccgaacgagccggcggcgatcgtcaggttgatgccgtagaccagcaccggcacctgcgccaggttggaggcgtccatccagtcggtggtcatcgggatgagcgacagccagaacagcaggttgaggttgccccacagcacccgcccgtcgacccgctccaccagttggaagtaatggtggtggttggtccagtagatgccgacgtagacgaagctcagcaaatagctgaggaagcccaggccggtctcatgcaccaggtcggagaagccattgccctcgggggtgtgcagctccaacaccatgatcgtgatgatgatggccagcacgccatcgctgaacgcttccaagcgagtgctcttcatggcgaaatcctgccaccgtgcggggcggcccagaacgactccggaacgcggcatcgggccttgtcgggcggactaacgtggggcgcgaatcggcggacgtgaccttgggaggacggcgcaaccggatcatgacaacccaacggcatgccacgcgccggccccgtcggctcgtggccctggtggcggcactcgtcgccctggtgctcgtggcggcaggcgcggtgctggtggtgcgttcgctcaatgcgtcgcgtgacgcgccacgcgacatggccggcaatccggtgcgcttcgcgccgggcaacacccccgccccctcgacgatcgaccagatgcaggtgcgcgacgccgattcggggcgcctgcaggtgccctcggtggggctggacgtgcccctgggctcgatgctggccgtcgacaatgtgatcaatcccccgggcttcacccaggcctattgggtgcgcaatgtgggcgtggcgcccgccgacgcgaccagcggcacggtctatgtggtgagccattcggtgagcaggggccgcgcgccgggcaactacctgctcaatgtggacaagggcagttcggcggtgaaccccggcgacctgatcgacgtggacggccacgactacatcgcccagtcgtggcgggcggtcggcaagacgcagcttcccgcggcacaggacctgtgggacgccgtgcccggacgcctggtgctcatcacctgcctcgagcagcccgacggcagctccccggacaacctcgtggtggtcgcccaactgcggtgaggacgggccgggaagccaacccccgcgaatccaagcccgctgaatccagccccgccgaatccaaccccgctgaatccgactgggggtggacgcgctcgcggcgtcgtcgcacacacaatggggtgatgacctccccgctgcccctgccgcctaaggtgtcgtcgtgcccagggtgaaacaggtcagcgactggttcggggcccatcccatgttcgccgactcggtatgggccggcctgatcggcattgcgagcctggtggccaccgccaacctcaacagccggtgggtccacatcagccccgtgccgacgttggaggtcctctccatcgtgtgggccctctctttcgccatcccgatgatctggcggcgcacccgtcccgtgctggcctgttggctgctgctgatcccccatgtggtgcagctggtggtcacctcgcaaccgatgccgggcaacatcacggtgatcatgatgatgtatgccgtggcggtgcacggctcgcagcgcgccggacgcatctggctgggcgtcggaatcctcgccgcggcggccgccgggctgcggtggagctatcagggcaacggcctcgaacagttcctgaccgtcgccatcttcaacttcctcggcctgtcggccttggtgctcgccagctggctgctgggtgccttcaaccgcgagcgccatgccaccgtcgcctcgctgcgcgaccgcgccgaggccctggaacgcgaacgcgaccgcttcgccgagctggccgccgagcaggagcgctcccgcatctcgcgcgagatgcacgacgtggtggcccactcgctgagcgtgatcgtggtgcagaccgacggcatccgctacgcgctcgaccaacccggcgaccccgccgcccaggtggaacaggcccgcggcgccctcgacaccatcgggcagaccgcccgcaccgcgctgcgcgacacccgcgccctggtgggcgcgctgcgcgacggcgagagcgtcgagatggcgccccaaccccaactcgacgacatcccccagctggtggcgtccacggcgaactccgggctgcccgtcgagctcacgatcgacggcgaccccgcatggcacgccccgctcggccccgcccagcaagcggccgcctaccgcatcgtgcaggaatccctgaccaatgtgatcaagcacgccggccccggcgcccacgcgtgggtgcgcctcatccacgacccgtccggactcaccatctgggtgcgcgatgacggccagggcaccctggacaatgatggcctggggcacggcctgatcggcatgcgcgaacgcgtcgcctcgtcgcacggcacgctgacggcgcgcaatcgcctcgacggcgggttcgaggtgatcgctacgctgccggtgggcgatcaatccgccgccgcccaggcggcaggtccacgcccggacacgcatcgcagagggaacgacaatggtcgcaggggagaagacaatgcccgatgagccgatccggctgctgctggccgacgaccaggagatggtgcgggtgggattccgcatggtgctcgactcccaacccgatatgaccgtggtcgccgaggcccccaatggccgcgacgccgtcgatgcggtgctgcgggccgcacccggacaggcccccgacgtcgccctgatggacatccggatgcccgtgctcgacggggtggccgccaccagcgagatcgtggccggcagcgacacccgcgtgctgatcctcaccaccttcgacctcgacgaatatgtctattcggcgctgcaggccggcgcctcgggcttcctgctgaaggacgccggacccaccgagctgctggccgccatccgggccgtggcctcgggcgactccgtggtggcacccagcgccacccgacgcctgcttgagcgcttcgtgcccacgctgcccactgcccagtcggggggcgacaccaagaagcggctggaggcgctgaccgaccgcgagcgcgaggtgctcacgctggtgggccaggggctcaacaacaccgagatcgccgagacgctgttcctgggcggcgccaccgtgaagacccatatcggccacatcctggccaagctggagctgcgcgaccgggtgcacatggtggtcttcgcctacgacgccggcctggtgcacccgcgcggctgagcgcgttcgagcggacccgatcccgccggtacacgactcgtccacacaactcgtctgacgacgcgacccttccacaaggcgcccgtcgaatttccgcgaccctgtggatacctccacttttggggcgcttccctgagagcctcccccctgaggaggagacaagaacccgacctgcgcccgatgtgcgccgaggggtcgcgctgtcagagttgatgcgaaggtcggggcagtgtgctgccggcgcccgatgtccggtgcgcaggcggtgctgatgccagcacgccacgcagcccgccccttcgaacctgatccagcttccccggaccaaccggcccggacctgacaaggagaatcatgacgaccatgacgcagccgacaacggccgcggtgcgcaccgtgcacctcacgaagatctacgggcagggtgacacacaggtgaccgccctggacgatgtgagcgtcgagttcatccgcggccagttcaccgccatcatgggcccctccggttcgggcaagtcgacgctgatgcactgtgctgccggcctcgacacccccaccagtggacaggtgttcatcggccaggtggacgccacctcgctgagcgacaccaacctcacgctgttgcggcgcgaacgcgtcggattcgtgttccaggcgttcaacctgctgcccacgatgaccgccgagcagaacatcctgctgccgctcaagctggcccacagcaagcccgacaggcaatggctcgacacgatcgtgaaggtgctcggcctgcaggaccggctcagccatcgtcccgccgagctgtcgggcggccagcagcagcgcgtcgccgtcgcacgcgcactcatcacgcgtcccgaggtgatcttcgccgatgagcccaccggcgccctcgattccgccgccagcaatgagctgctggacttcctgtcgcgcagcgtccatgagttgggccagaccatcgtgatggttacccacgacgcgcacgccgccggcttctccgaccgcgtgctgcgcctggccgacggacgcatcgtctccgacgagccggtgaaccacccggtggccgggcagacccccgtgccgaccaccggcttcaccgccggcgccgtcgcgggtgccacgaactatgcgccggcgccgtcgactcccccgcagatgccgaccccgcagatgcccaatccccagatgccaccgccccagatgcctgccccgcaggcgccggcggccaccccgcagcgccccgacgacgccaacggcaccggactcaagcgccaggccggtgacgcctgatgctgcgccagccacgacaactcatcagcgcaggcatcgcgatcctgttgggggtggccttcgtggccgccaccttcgtgttcagcgcctcgttgaacgccggcatgaccaagctggtcgccggcatggtgggcgacgcgaaggttgccgtcagcccctcggacaaggtctacacgccggtgaccccgcagcaggccgataccgtcagcaaggtgccgggcatcacccgtgcgaagaagatcgtgcagggcagcgccaccctgcaggtcgacggccaggacaaccgggcgctgatcagctcgcagcccgacctgagctccgagaccacgctgttcgagggcacgctcgccaagggtgatggccaggtgagcatcagcaagtcagccgccgacgcctatcacctcaagctgggcgacaaggtgacgctggagaccttcgacaaccagaccttcgacgagaccgtcgtcggcatcatcaacgccggcaacgacgcggtcacccagccgctcgccagctgggtcttcgcccccaccgagcaggccatggccatggcgtccaccaatggctacaacctggtgctgctctacggcaacggcgacgacaccgcgctgcgcgatgcggtgcagtcggcccagggcgtctcggacgcccagctgaccgtgcgcaccgggcaggacgaggtgaaggcggccatgaagcagatgaccggcagcaccaactccatccagtacgtgctgctcggcttcgccgcgatcgccctgttcgtgggcatcatcgtgatcgccaacaccttctcgatcctggtggcccaacgcgtgcgccagctggccctgctgcgctgcgtgggagcaacccgcaaccaggtgttcggcatggtcttcggtgaagccgcgctcctgggcctggtcggttccgtggcaggcatcctggccggcttcggcctggccgccgcgctgatcccgctggcctcgaagggtgcgcagatcccgctggcgttctccatttcacccgcagcggtgatcgtgccgctcgtggtgggcgtgctcatcaccctggccgcgtcgatctcgccggcgcgcaaggccacgcgggtggctcccctggccgccatgcgtcccgaactggccgtcggcaaggccaagcgcctgggcatcgtgcgcgccatcatcggcgtgctgctggtggccggtggtgccgcgatgttggccatgggcatggtgcgcgccaagcccaactcgggcatgagcggactggtgatcgccatcggcggcggcctgctcagcttcatcggcgtattgctggtgggtcgcggcctgatccccgcactggcccggctcattggcacgccgctggccaagtcgagcgtgtcgggtgacctcgcggtgggcaacacccgccgcaatcccggacgcgccgcggccaccgccaatgcgctgttggtgggcgtgacgctcatcacgctgctgaccgtcggtgcctccgcgtcgcaggccagcctcgaccgttatctgtcggccacctacccgcaggatgcggtggtgtcagccgtcaagagcgtcgacgagcagaccctgaccaggatcaaggccaccgatggcgtgcaggacgccgccctggtgcccagcaccaccgccgatgtgagctatggcaccacgaacaccgagcgcaaggtggatggcgttgacaacgccgccgcgcacctgacgcacttcccccagcgctacgagaacctggacgacaacaccgtccgcacctccgacacgagcctccacgatggcgagacggtgaccatcaagggcaccgccggcaccacggtgcagctcaccgccaaggtgtccgacgactacgccccgacgttgatcgtcagcaccaccgtgctgaacaagatcgacgccgatgcccccgacagtgcctgggtgcagtacaaggcgggcgcgaacgtgaacaccgtgaccaccgacctgggcaaggcgatcggcaacctgggacattcgtccatcgacagcggcgcccaggcacgtgcccagttcgggcagatgatcgacatcgtcctggccgtggccgtgggcctgctggcggtggccgtggcgatcgccgtgatcggcgtggccaacacgctgggcctgtcggtgttggaacgtacccaggagatcggcctgttgcgggcgttgggcatgacccgacgccaggtgcgggcgatgatcagctgggaggccgtgatgatcgccgtggttgccgcggcgctcggcctggcgctcggcgtgacctacggcctgatcggtgcgaagaccctgctcgggtcgatcaccagcacgcccttcgtcgcggggctgccgtgggtgcgactggtgatcatcggcctgatcgccgtggcagccggatggcttgcctcgctgatcccggcctcacgcgccaaccgcatctcaccctcggcggcgctggccaccgaatagtcgctatccgcggggtgggtccgacgaccggaccccaccctgcggaccgaccaacgaccggcgcccgcaaggttggcctggccaacctctggccgatccgacagtcggtacagccaacaaggacccatgtccgacggcgggttgtcacccgctcgccaccggacatgggtccttgctcttgttgcaggcgcctatgcgaggctcttgtggaggctccgtattggggggtcgtcctgaggggccccggtcaggatcgctgccgggccgcggccctcgatcgtcgaccggctcagctcccggacccctcacatggtcgaccggctcagttgcccgtcttgtcggaatcgtcgaccttggcgttcggatcggccagcgcgtcgatggccttcatctcctgggccgacagctcgacgccgattgcctcgaggttcgtgcgctggtgctcggggttcgccgacttcggaatcgtgacgatcccctggttgagttcccaggccaacaccgcagcggccggcgtgatgccgtgcttcttggcggcgtccagcacggccggcgcattgagcacgccgtcggcgccacgtcccagcgggctccatgcctcggtgacgatgtcgtggttgtcgaggaagtcgcgcacctccaggcgcggacgcgaggggtcgagctggatctggttcacctcgggggtcatgccctcggtgatcaggtcgtcgaggtggtgcaccttgaagttggagacgccgatcgccttggccaggccctgttccttgagctcgaccatgccgcggtaggcgtcaacgtagctgccctcgccgggcatcggccagtgcatcaggaacaggtcgacgtaatcgagcccgaggcgctccagggaatgctccagggcctcatgcacgcccttcctgctgtgccactgcttggagaacttggtggtgacgaagatctcggcgcgatcggggccggcctcacgcaccgccttgccgacggcctcctcgttgccgtaggcctcagcggtgtcgaccagccggtagccctgctcgatggcgctggccacggcggcgcggcactcctcgcccttcagcggccaggtgcccatgccgagcatcggcatcctggtgccgcctgacagttcgacggtgggggtgggtgtggtgggaatgatcatcgttttccttcctgggggcgggccaccggatcagtggcgtctcctgttaccagtcttgccacttgatacgaccagactcaagtctggggccgcgtgaaccgccgtcagctcccgatgctggcgaaccagaccggcccgcccaggccctccacctcggccacgggctccagctggtcgtccacccggtagatcgtcgcggtgtcgcccagctcggcgccggcaatcacgtgatggtcaccgatcaggcccatgccgcgcggctgcttctcggtgggcacgtggtcgagccgggccccgaagctgccgtcgtcgttgagggcctgcaggttgagcgtggacgcgcgccgctcgctggccaggatccagtggcgttgcgggtcgagggccaactcggcgccccagtggcgcaaggtctggtcgtcgaggctgggggtgctgccgctgggcacgtgcacgccgggacgcaggtcatcggcgcggtccgaatagggcacgcgctcggccaccgtcagccggccgctgtcggggtcgcgggtgaggtgcacgatgtggccgcccagttcctcgatgaggtagccgtgctcccccgacgcgtcgaacaccaggtggcgcgggccggtgccgtgctcgaactgcacgccgatctgctcgtcggccaccagttcgccgtcggacacgcggaagccctgcacccggttggcacccagttccaccacatagacgtggcgtccgtcgggcgagggttcgacgcagtgtggttgctcgcccacctgctccacatgccaggccgaatcgtcgatcaggtggttgtcccacaccggcgcccaggccaggcggctggcgtggtagctcaccacgaaggccatccggtcgtcgggcgtgaagctcaggtaggtggccgacagggggcagttgacctcgctgagcacctggcaactgccgtcgggcagcaacttgagcgtgctgacgcgcaggggatcggcgcccgtggccacccgcagcagccggcgttcgcggttgagctccaggggcatcggcttgggcccgaggttgagccgcgacacgacctcggcggtctcggccttgtcgtcgaagcgcaccgtggtgatgaggccgtcgcgcctgccactgacataacacagctgggtggacatgctcccaacctaaccacgccgcgcttcgcgtccatggccggccggtaggctgaaacacgtcgacaggcccaccccaaggagttcggatgacccatcacgcagctgtcattggcagcccgatcgcgcattcgttgtcgccggtgttgcaccgtgcggcctaccagcagctcggcctccacgactgggagtacgacgccatcgaggtgactcccgacaccctgggcgagttcatcgccagccgcgacaacagctgggccggcctgtcggtgaccgccccgctgaaggaggcgctcatcgagttcgggcgtcccgaccagcaatcgtcggagctgcagagcgccaacacgctgatcttcggacaccccaaccggctgttcaacaccgacgtgaccggcctgcgcgacgcgatggccagctacgacgtgatcatgcccggcaccgcggtgatcatgggggccggcgccaccgcccgcagcgccatctcgacgctggtgcgcctcggttgccgggtgatccgggtggtcgcccgcgacgccggacgcgcccacgccagcctcgaccgggttgccgccctgtacggcaccgacctgcagatcgttgactggtcaggcttcgacgccctgggtgccgacagcgccgatgtgctcatctccaccgccccggtgcagtacacgcccgaggaggccgcccagctggccgccgtctcgcaggtggtcttcgacatcgtctaccagaactaccccaccaacctcagccgggccgccatcaaggccggccgggtgagcgtcgacggcgtcgacctgctggtgcaccaggccatcgaccaggtgcgcctgatgaccggcgaggaacccctggccgagccgctgatcgaggtctgccgcgcggagctcgccaaccgttgagctgcggcggcgcggggacgccccgttcggttgaactgtgaacaccccgggcgccggtccggtcaggccgattcaggccacgaaggggcgtcaggcgtcgcgcacgcccagggccacgtcgggcacattggtgatgatcgcatccacctcgaggtcgagcagcgcctggatctgggcgggcttgtcgatcgtccacacgttcaccgacaggccgcgcttgtgggctgcgcgcacgacgcccgggttcacccgcaccgcccgtcccgagggatgcagggcactggcaccgagctcggcggcgtatttcgcggcacgccacaggaccgagtcgtagagcaggcccaccggatagtcgcgctcggcaagccggcgcatcgagcggtggttgaacgacgagtagaacaccttgtcatcccaccccgcggcatgcaccagcgcgagcacctgggcctccatgccctcatagggcaccaccgagttcttcagctcgatgttgatcatcagcccggtggggccgagcacgtcgaacacctcggccagcgtggggatggccacattggtgaactccggatggcccgccgagaagtcgaactccttgagctgcgacaaggtgtaatcagccaggttgccgacgccattgctcgtgcggtcgatcgtctcgtcgtggcagaccaccagctggccgtcacgggtgcgttgcacgtcgagctccactccgtcggcacccagggtggcggccgcctggaaggcgggcagggtgttctcgggggcagccgcggaggcgccgcggtgggcccagacggcggtcacagcgcgggcctgaccgacaccgtgtcgacattggcgcccggacgcatcgtcagggccagctccacggcacgggcgacgtcggcgggctgcaggtagcgctcgggttggtattgcgcaccgagctggcgctggatgtccacctgcatgtcggtgtcgacgcggccggggtgcaccgaggtgacgcgcacgacgccgcgttcctcctcgcgcaggccgtcggtgaacgcaaccagtgcgtgcttggtggcggcgtagcaggtctggccgggaccggtgtggaatcccgagccggagttgatggtgaccacctggccgtgcgcctcgcgcagcttgggcagcagttcggcggtgaggtcggccaccgccaccacgttgatctcgtagaggtcgcgccagtcctggcggctcagttcggacaccgggcccatcaccaccgcgccggccgagtgcaccaccgcgtcgaggtgaccgatctgttccactgcggcctgcatcgcgccggcgtcggtgaggtcggcgatgaagggctcggcgctgggcagggcctgcaccaccttcctcacctggtcgggatgccggccgccgaccagcacatgccagtcgtccgccagctcgtcggcgatcgcacgcccgatgccacgggttgcgccggtgatgagaaccgctctgcgttcagccatggcctcagcctaatgagcgcgccgcgggggtggggcacccgaccgatcgttatccagtcgacgccggcagcgggcgtcccggctggaatactggtgcggccctgcgagcacacgctggttcgagaggaagcaatggaggtctggcagaacaacgccttcgtcacggtgctggtgggaggcgtcgccttcctggtgctgttccttccctatgtggtgtggtcattccaccggttcggccagctgagcttccggcggatcatcgggtgggccgcagtgtgcgtctatttcaccggcctggccgtgtacacgctggtgccgttccccgaggacccgcaggccttctgcgcgtcgacgcacgtgggctacaacctgcatcccctcgagttcatcaccgatatccgcacgcagaccgccggcatgggcctgcggagcgcgctgaccagcgccgtggtgctgcaggtggtgttcaacgtggtgctgttcgtgccactcggcgtgctgctgcaccgctatttccggcgcggcgcgatcaccagcacgctcatcggcctcatcatgtcggtgtgcattgagaccacgcagtacacgggcttcttcggcctgctgccgtgcgcctatcgcgtggctgacgtggacgatgtgatcaccaataccgccggcacgctgatcggggcgctcatcgcgccgctgctgttgttctggatgcccgcctcacgcacgctgacgtccacccggctggtggcccgcccggtcacctcgatgcgccgctgggtgggcatggtggtggatggcttcctgttctacctgatcgccgccagcagctccatcgccgtgctggtggccggacgcctgctgtcgtggtggccggtggaggccgagcccgagtggatctcaccggcgggtgatgtggtggcgttgctgatggtgttcgtgatcccctcgctgaccggtcggggcgggtcccttggccagcgggtggtctggctgacgccgcggtggcctgcggcggctggctcgggtgacgggtcgggcggggcggtcggcgctgattcgtcgggtgacacggtcggcggcggttggccggacggcgcagcgcctgacggagggcagatgggcggtggaacgtaccgcggtgggtcgctggacagtgggtcgctgggcagtgggttgccgagcagtgggttgtcggacggtcgaacactggccaatgggccgcttgcgttcgctggtggtcgtgggcccgctggtggccacgcgggtgctccagctgttcatcggtgaaccggtgtcgggcgcgctcaatgcgctggccacgctggtgatcgtgctcgccgtggtgatggtggtgcccacccgcagccaccggtcattgtcgggctggttgaccggcgccgacatggtcgactcccggagcatgacgcccaccgcggctggccccggcgcgggtggtcccggcgtgggtggttccggcgcggccgacccgacctgacgacgcgtcctgctccgccctgacgacgcgtcccgccctggttctgccgctgcctggtctctcactgggcagttgtgcggcaatgacgccgcacaggtgcccactgagcggccgtgatcggtggatcaacaggataggtgcggataaagcacggtggacggtgcttttgtcgaccccatcatccggtcagggcacgaggcccgacgcccggtgttcaggcggagccccggggcctggcggttcccagcggtgggctttccgcttgggtgggcagttgtgcggcaatgacgtcgcacaggtgcccacccaagggggtcaggccaagtggatgtcagcccgagtggacgtcaggccgggcggacgccggaccacgcagccgggacggtcaggcaggcatgcccacgagataggtgcggattgagcaccacggacggtgcttcatccgtacctgtcgtcgcgtctcaccgcgtcgggcatcaggatcggcccgcggcgtctggccggacgcggtcccggccccgaacccacggacgtacaggccccaaacgcaaaaagaaggccccgctttcgcggggccttcttgagtggcgcgcccagagggattcgaacccccaaccttctgatccgtagtcagatgctctatccgttaagccatgggcgcatcgccttgcggcgcctcaccatgctagtacatgggtgccatctgatccaagccgagttgtcggcgacgaccggctgcgcggcagtccgcgtcgcccaccgaccgggcaaccggggcccacggcaggcgtcgtcgtgggcaacgaaaagcggtccgccaccgaggatgacggaccgcaaaaagctggcggaggtggcgggattcgaacccgcgatgggatttgtgtcccaaacccgcttagcaggcgggcgccatagaccaactaggcgacacctccagcgacacgaaagactatcggctggcagggcccagagcaaagctcgagccaagcttcacgtcgcaatgtgcctcacacatgttcgcacggcatgatggttggcgtacatccccggccgacgagatggggcccgcgcgtccgggcaagccagggcgtcgccggggcccaccgacgcaggcataaactgcccgcgcgggtggccacgagggttcgacgcggccgaagaacgcgactgaagaatgggtgacatggcagacgacgacgttcagcgaccccgcagggtccggcgcgccgccgacgatgcacactccgccacgccccccgcgtccggcaccccgggcacgccgcggcgcatctgggcccgcccgcagcccgaggacccgccgaccacccctccggcagcccccgaagcgccggcagccccttccacaccggcagatcccacgcccaccggcggctcctcgcggcgcggcatgggcacgaacgaaccccacgtcagcaagtggggcacccgcgagtcgacgccggagcccacggcgagcgccacaccgcgccgctcctggtcgcgtcgacgcgccgagtccacgggagaccagcccccggtcggatcgggccatcccaccggcgagggcacgggtccgcgccacgcacgccgctccgcgccgatccacaagccggtcgaaagcgacctctcccaccccgatgccccccgcagcaccgccgccgcagatgcgacgacgccatcccccgccccggccgagcaggcacccacgcgtccggcaccgccagccgccgcgacaccccggggacgccaacacgacgccccgaccccacgtgcgtccgcacccgacaagcacgtagcctcccggcgcacgcccgcgaccacgcccccggccgcagccacgccgcacagtgccgcaccccacagcccagcaccccatgacccgacgccccccagcccgacgacccacgcccccacacccggcacaccgaccgcgccccgctccgagcggggcgccaacctcacgctgggcggtgagccgctcggcgagcacaccgccttcctgcatgcccccgactaccggcatgccaacgccgccgcccgggccgcggccagggagcgcgcccgacgcgccgcagccggcaccgaacctgccgcacacgacggcgaactgttcgacgtcgagcaggtggggctgcgcgaaccgccaccgccaccgcccgaacccgaaccggcctcgctgcgcagtcgcttcgccgcgttcaccaagcgcagcgacgacaccggctcgcacggctttggctggacgatgctgcgcaccacactcggctccctgatccccggcgccggcctgatcggcacccgcctcacgatgatcggcacgctgctgttcatgatgacggtggtcttcggctccggcgtgatcctggccgccgtggtgcacccgcccgcgctgatggccaccgtgatgaactcagtgggcctgaccgccatcggcaccatgttggttgccgtcacgatcatctggatggccatcgtcgccggcacctacctggtgacccggccgcggcgcatgaagcgctggcaacgcatcgcgggcgccatcgtcgtcttcctgatggccgccctggtgggctcggtgagttcggtgggcgccgcctacgcgttcgaatcggcgatcgtcgtcagcgacgtcttcggcaactccaagacccgctcgcagacgcgtccgctcggcgactgggccaacaaggaccgggtgaacatcctgttgctggggggcgactcgggcgcggaccgcgacgaggacctcggcctgcgcaccgacacggtgatgctcgcgtcgatcaacacccacaccggcaatacggtgttcatccagctgccccgcaacctcgagaacgtgcccttccccgccggcagcgacctggcgaaggtctaccccaatggacgcgtctgggaccggtcgtcgggcaccgaggacaactacatgctcaacgcggtgtggaatgaggtgccgctggagcatccggagctgttcaggaacaccgatcagcccggcgccgacgccacgaagctggccgtcagcggcatcaccgggctcaccgtcgactactacgcgatgatcaacatcgacggcatccaggcgctggtcgacgccatgggcggcgtggtggtcaacatcaacttcccgatcgccaagggtggccatgtcgacggatacggcgacgaggagtgtggcgtcgacggcaacctgtcggtggggcccgaccagaagctcgatggcgccgatgccatgtggtacgcccgcagccgctgcaacgaccccgactacgactacgggcgcatgcgccggcagagctgcctggtgaatgcgatcatccggcaggccaatccgcagaccatgctcacccgctatgaggcgatcgcggccgccggcaagaacatgatgagcaccgacatccccgagagcctgctcgacgacgccaccaacctggccctgcaggtgaaggacgcccaggtgagccgcgtggtgttctcgcaggccatcggcaccgccccgcaggtcggtgacatcaatccgggcaaccccgactacaacgcgatccggaaccgcatctccggtgccatcaccgccagcgacaatggcaccacgccgtcggcgccggcatcggcgtccagctcaccgatggccacgggcagtgcgggatcggcgagcagcgtcgcatcagcggccggcagcgggtcgacgagtgccagcgcggccggtgcggcagcaaccccgtccggcaccgcagagaacatgagcggggcctgcgactaccaccccaactgattccacctcggtggagccggtctgattccacgtgcggtcgagccggtctggtcctgatgccggacgcggtgataggtgcggataaagcaccgtctacggtgctttatccgcacctatcacgtgggtattcacgtgggtatgcccgaccgagtggcccgacgccgccccagccggaaacccttttgggtggtcacctgtgcggcgtcattgccgcacaactgcccacctggccagaaacctctaccccgagccccttgagtggtcacctgtgcggcgtcattcccgcacaactgcccactgagtgacaagggtcgtggcccgaaccagtggatccggattcagtggatgggacccgacaaggcctcgcgttcatggttcgacgtaccgcgccgccatgaccacccagcccccggagaaccggcaccgccgcgcgccgccaaccagcccgctagcgccgcgagtgctcgggcaggtgcgccgagatctccttgatcagcgcctgcatggccggatcgtccccgcccttggggcagctgatgtaggtgcgcttcaccggtccggaggcaatcatcagccgtgaaccatcgggcgtcacggccacccgggtgaccttggcccaggtgccgcgtcggtccatgccgggaccgtgcacgcggtagcccttcgcgtcgaggtcgatgtggatgcggtggttgaccatcgagtaggccaccatcagcagcgtcagcaggccgacggcaagcagcgccgccaacacgatgattgccaggatcgcccagttctgcaccagcccgatcaccaccagcaccaggcccaccacggtggccgcactgcccagcacgaacgcacgacgcggtatgcgggggcgcaggatgtagctgctcatatctctccctcatcacgcgttggcctgctgccgtcagggccacctcgcagggacgaccctccaggctcgacgatcacgcgaactcccgcccgcgacatcatcggtggcggcgagggtgggattcgaacccacggagctttcgctcggccgctttcaaggcggctgcactcgtccactatgcgacctcgccacgcgtccggtggacgcattttcatggtagcggacgcgcgggtctggcagtctggggacatgcacgcgatcacagtggacgaaccgggcggcgtcgatgtcatgagctgggccgaggtgcccatccccgatcccggaccgggcgaggtgctggtgcgcacgcaggctgcgggcgtgaaccgcggcgatgtgctgcagcgccaggggcactatcccccgccggccggcatcaccgacatcatgggcatggaggccctcggtgtcatcgagaagcttggcgacggtgtcgaggggcaccaggtgggcgagcaggtgctggcgctggtcagcggcggcgcctatgccgagttcttcgtggtgcccgcgggccagctgctgaagctgcccgccggcatcgacccgttggccgcggcgggactggtggaggtggccgccacggtggtgtccaacttcgaccgggtgcacctgtcggccggcgagaccgtgctcatccacggtggcgcgggcggcatcggcacgctggccatccagtacgcgaaggccctgggtgcgcacgtgatcgtcaccgccgggtcggccaagaagcttgcctattgccgcaagctgggcgctgacgagggcttcgactaccacgacgactgggagccccaggtgatgatggccacgcaggatcgcggcgtcgacgtgatcctcgacatcgtgggcgccaagtacctcgaggcgaatgtgcgttgcctggccgacgacggacgcctggtgatcatcggcatgcagaagggcaccaagggcaccctgaacatcgccgtgctgctgaacaagcgcggcaccgtgacggccaccagcctgcggttccgctcgctggccagcaaggcggccatctgccgtcgcgtggaggaggccatctggccgctcctctcgtcgggcgcgatcaagcccggcaaccagacgcaggtgccgatggcacatgcctccaaggcccatgagctgctcgaatcgggcgacaacaccggcaagatcatcctggtggtctgagccgcacatgctcgtgctgccggggagggttggcgtcgccacgtgggacgccgacccatccccggtcacgacagcctgatggcatagatattccttcaaaagcataagtgtcggctgattcacgctcagccgatggatcgacatcgcataagtttcgggttatgctggatgttgtgagtaaggttctgacatctcttccggtcggccagcgggtcggcatcgccttcagcggcggcctcgatacgagctgcgccgtcgcctggatgcgcgaaaagggcgccatcccctgcacctacaccgccgacatcggccagtacgacgagcccgacatcgcgtcggtgcccgggcgcgccggacagtacggggctgaactcagccgcctggtcgactgcagagaatcgctggtcgaggagggcctgtcggccctggcctgcggcgccttccacgtgcagagcgcgggtcgcgcatatttcaacaccaccccgatcggccgcgccgtcaccggcacgctgctggtgcgggccatgaacgacgacaacgtctccatctggggcgacggctccacctacaagggcaatgacatcgagcggttctaccgctacggcctgatggccaacccgtcactgcgcatctacaagccctggctcgacgaggacttcgtctccgagctcggtggccgcgacgagatgagcgtgtggctgcagaagcgcaacctgccctaccgcgactccaaggagaaggcctactccaccgacgccaatatctggggcgccacgcacgaggccaagaccctggagcaccttgacgtgtcgttggagaccgtcgagccgatcatgggcgtgaagttctgggatccgtcggtcacgatcgacaccgaggacgtgaccatcggcttcgagcagggccgtccggtgaccatcaacggcaagaagttcgattcggccgtcgacctggtgctggaggccaacaaggtgggcggacgccacggcctgggcatgagcgaccagatcgagaaccgcatcatcgaggccaagagccgcggcatctacgaggcccccggcatggccctgttgttcatcgcctacgagcgcctggtgaacgcgatccacaacgaggacacgatcatcaactaccgcaacgagggcatgcgcctgggccggctgctgtacgagggtcgctggctcgacccgcagtcgctcatgatccgcgagtccatccagcgctgggtcgccagcgtggtcaccggcgaggtgacgctgcggctgcgtcgcggcgaggactacacgatcgtcaacaccgacggcccggcgttcagctaccaccccgagcgcctgtcgatggagcgcgtgcaggacgccgccttcggtccgctcgaccggatcggccagctcaccatgcgcaatctcgacatctcggattcgcgctcgcgccttgagcagtatgcgagccagggccagctcaccggcggcgaggccgccaagctggtcggtgccctggagcccggcaaggcctccgagatcgcagaccatcccgagcatgccggcacgtcgcacgccacgccgctggacaacgcagccatggagaccggcgccgactaggtcgccaaccccttcacaaccggcccaccccccgtgggccgcacacagtcaccatcgccggccacccgccagtgtggaccagtcacccggcccatacagcacaggtcgtagcccccgggcccgatctgatgacgggccgaccggcatgaacaaccgagcgctccgcagcgcaccgcctccgggtggttcgtcgcggggcgctcggcttgtgtggggacactgcccacaagactgatctgcgggggctcgtccacgtccacggccgtggcatccggcgatgcggacggcgcaccacccggaacgcacgcaacaacgcacgtcatatggaacgcaggcaatgtggaaggcgcccgcccgaagaccccctgctccggacgagcgccgaaccgctcgaggctcctgatcactgggagaacacccccatcctcccggtgaccattcggcgatcctgcgaacaggaccgcgcgggctgccttatgtgcggctctacctagtacagaccaatcctgcaccgggtgcaagtgcgggaaggtgcaaaatgcggccccacgcgggcaaccccgttacccgctcacgatgcggacggtgaagtctcaactgatgggatgaatcgtccccggggttacttcacgcaggggataccgccgccgctgatctgggtcagctggctgggctccgggccgctctggccgccgctattggcgtccacggcgctgggaatggcggtgctgctggccgacggcgacaccgacgagcccccggtgctcgcggcgctggacgccgcactgggcgaagccgagggccacccggtgaagccggtgcccatgtgcaccaccaccgcattggccccgagcgtcgaatcggcattggcggacaacccgcccaactgctgggccaactgcttggcctggcccgccaccgcggagccgtagctgacgctggactcctgcaggatgtcggccccattggtcgcctggccggccgtgaacccgaaaccggtgagctggcccaccagcgaggcagcggccccggtgacgcccgactcgttcatcaccgacacggtggcacccatcccgtaggtggggctgtagctcgccgagccgctggtgctcgcgctggccgaggggctcgcgctctgccccgggtgcaggatcgagcgcacgatgccctggatcttggccttgtcgaccacattgatcgcggcgccgtcgtcggcggtgccgaagctctccaccggcagggtgtagaagttcagcttggaaccctccagcgacgtggccagcgaggtgagctgggagatcttgaggttcttgtcgagcaccgtgttctgctgggccacctgcaccagcttgtcgagctggccggggttggtgagcaggttcgtcttcttcagcttcaccagcagcgaggcgatgaacgcctgctggcgccgggagcggtcgaggtcggtgaacgccaggtcgggattgtcggtgtcgcggcgctggcgcacgaaggccatcgcctgctcggcgttgatgtcctgctcgccagccttgaagtcagcgcccgaataggtgtcgaccgtcttctcgttgacgcacactgtgatgggctgcaccacctgggcgatctggaagaaggccaccatcgtcacctcgatgaagtggtcgatctccaccccgaggaactgctccaccgtcctcacctcggcggcgcgtccggcatcgcgggcctgctggtaggcgtcctggccggtcttgccctgcttgtcgagctcctgggtcttggcgtcggcggcgtagccgtaggcctccttgatcttgcccttgcagacgccgtcggggcagcccgggaagtcgacatagtcgtcgcgcgggatcgcgaagacgctggcctgcgagccgtcagccggcacgtgcacgtacatgagcacattggaattgaggccgccatcggaggcgtcacccgaatgcagggcgtcgtagatgtcggagggcagggcattgccgttgacgtcgacgcgcgagtcgagccccatcaccagcaggtcgaggtcggagctctgcgaggtcttgtcggcgatcgcgccggatcgcttgatgcccgcgttggcgcgccagatgtagatgccggcggcggccacgacgacgaagagcaccagggccatggcgagggcggcgatgcgaccccagcggggacgcaaccggcccctgcggcgcttggcggccgagtcggcatacctcggggtgttggcgccgtcaccgggatcgtcggctgcgcgggcagcccggcgtgcgcgggaggccgacgaggggtcgtcgacatgcccaccctggggctcttcgctcatctgccggtccttccgtacctgtgacggcgagtcgtgcggaccccggcgcgcgctgcgcggcccggccatccggtggccggcgcgtcggccggtcgtccactcgctccccggcgcccgtggggagccggaaatgttggcgcggcggggactcccccgcaccgacacgcttgcattctgccagctcgccctagggtggagctgtgagtgcagatcagttgagcagaatacttgccccggcagaccacgtggtctttttcggcggcgcaggcgtgtccaccgagagcgggattcccgatttcaggtcggccaccggactctacaagacgcagtccgggggcgaattcccgcccgaatacatgctctcgcacagctgctgggccgaccatcccgaagatttctatgcgttctaccgcaagaacatgttgcatcccgaggcgaagccgaatgcggcgcactatgcattggccaggcttgagaaggcgggccggctcaccgccgtggtcacccagaacatcgacggactccaccagatggccggctcgcagaaggtctttgaactgcacggctcggtgttgcgcaaccactgcgtcgattgccaccgcagctatcccgtggaggcgatcgagcagagcaccggcatcccgcgctgcaccgtgtgcaatggcatcatcaagcccgacgtggtgctctacgaggagggcctggaccccgacgtgatggacggcgccacgcgcgccatcatggccgccgacgtgctgatcgtgggcggcacctccctgaacgtgtacccggccgccgggctgttggagtactaccgcggcgacaagctcgtgctcatcaacaagtcggcgacgccggccgacaacagggcccagctggtgatccacgactcgatcggcaaggtgctgggccaggccgtcgacgaggtgctcggcgacaaggcctgagcggtcgggcccggcgcaggcgggaccggacaacaaacagggactgcgttcaggtgaacgcagtcccttggtcattccgcggcagtgttactggacgccgctgcgaccggatgtcgccgcaagtcggtgccatggtccgccgcgcggcgtcggaccagcaggcgtgcctacttcagtgcggccaccgcgtcgtcgtagtcgggctcattgccgatctcggggacgagctggttgtagaccaccgtgccgttctcatcgatcaccacgacgctgcgcgcgagcagtccggccagcgggccgtcggtcatcagcacgccgtagttgctgaaggaatgcttgcggaacgcggaggcgggcaccacgttctcaatgccctcggcgacgcagaagcgctcggcggcgaagggcaggtccttcgacacggccagcacggtggtgttgtcgagcccggcggccagcttgttgaaggtgcgcacgctggtggcgcacacgcccgtgtcgaggctcgggaagatgttcagcacgacgcggcgtccacgcagggacttcagggtgatggtggacaggtccttgcccaccagttcgaagtcgggcgcctggcttccgacggccggcagttcgccgacggtgtggacgggggttccttggaatgcagtcgttgacatgactcatgtctacgacggatgcacccgtgatggccagttttttggctgaaggcgcagacgggaataggccgtccgggcgcgccgggtggtgattgggcgtgacggcgctgcaggtcacccccagacgcagccgcgctgcatgccacccccagacgcagctgcgctgcaggtcacccagacgcagctccgctgcatggagttcctatgaagatcgtggcccaaccattgagccgcgcctcggcgcgcgagcaggctatggacacagccccttggggaacccgatcacacaggagagatccgccacatgtcgcgccgcttcgccaccaccctcgccgccagtgccctgagcctcgtggtgcttgccggatgttccaccgccaccgccggcccgtcgtcaggcaccccctcgggcaccgtcaccgccggtgcggcgtcgaacaccagctccactgccgccaacggatcggtggacgtggcgaaggccggcgtcgaggagctcaagggcgccgacgcgcgcacgttggtggacaagctggaggccaccccgctgagccagcgccgcaccgacctgcgggcctcggtgcgcgccgacgagctgcagttgtcggacacctcgggcaacaaggcgtcggtgaagatgccggccgcccagttctacctgtcgttcgcgccctatgtgaacaagacccatgactgcacctaccacagcctcaccacctgcaaggcggagttgggcaacaagcagatgcacgtgaccgtcaccgacgccgcgggcgccacggtgatcgaccaggacctgaccgccgccgacaacggcttcatcggggtctggctgccgcgcaacatcaccggcacgctgaccgtgagctacgacggcaagtcggccagccagcagatctccaccgccaaggccgacgaccccacctgcctgacgacgctgcacctggcctgagcagggggaacgccgggccggctggggattcgcccggcactcgggggcacgcccggcccgatcagtgcagcaccggcaccgtcacggtgaacgtcgcgccgcgtcccggtccggggctgtcggcactgatacgtccgtgatgggccgacatgatggcacgggccaccgtcaacccgatgccgaagcctccgctgctgcggtcgcgggcgggccccacccgcgcgaagcggtcaaagacatgcggcagctcctcgggtgagatccccacgccatcgtcgcgcacctgcaccgccacctcgttgccgtggcggcgcacgcccacgtgcacatggccgccccggtcaccagtacgcccgcggccggcggacacggtggcattgagcgcattggccagcaggttcgtgatcacctgcgcgaagcgggcggtgtccagctgcgcgcgggcatgggtggccacgtccagggtgagctgcacgcctgcctcgcggtagcgcagcgccatgtcgtcgacgcaaccccgcaccaccgacgccacctcaccgggggcgaactcgtagcgcagcgcatgttcctgggcctgcgacaacagcccgatgtcgctcgacagccgggtgaggcgctcggcctgggcgcgcagcaccgggatggagtcctccaccccgaccacaccgtcctcgatgccctccagctgagcctgcaccaccgcgatcggggtgcgcatctcgtgggccaggtcgctgaacaaccgggtgcgtgactgttcgacgctggccagccgctgcgacatggcattgaccgcctcggtgagctcgtcgaactccgcgcccagggggccggcgtccacccgtgcggtgtagtcgccggcggccacctggcgggcggcggcggccaggggtgccagcgacgccgagacccgggtggccaggtagagcgagacgagcagcgcggccagcacggcgatgaggatcgccaccgccagggcgatcatgttggacgagcgcatgccctcctccacgtgacgcagcacggtctcggggttcgacaggtcggcctgcatgaggtgcgcatggaagatcgccgggctcaccagggcgtccaccacgaagatggtcaccaccgccacgcccaccaccacggcggcaccggtgaggaaccgacgcgcgatcgatcggcgggtgagcacatgccaccagcgccggacgccagccccactgtccctgctgtccctgcggtccccggtgcccgcggcgtcccttccgtccccgagtgcggcgtccctcggcacgtcgggtgcggacggggttgccgggtgcgtgcccgccggccgatcgggggtccggggctcgctcaccggccctgtcccatccgatagccgacgccgcgcacggtctcgatgaaccgggcgttggccgccgaatcgcccagcttcttgcgcaggtggccgatgtgggtgtccaccagctggtcgtcccccgaccagccgacgccccagacggcctcgatcaactcatcgcggctgatggcgcggcgtggattgcgcgccaggtgcaccaacagttcgaactcggtgcgggtgagggcgatctcgcgggtgcccagctgcacctcgcgggccgccgggtcgatcgtcagctcccctatgcgcaggggctgctcgtcgggcggggtgatggcgctgcgggggcggcgttgcatcgcctgcacccgggcgatcagcagccgcgggctgaacggcttggtgaggtagtcgtcggcacccaccgacaggccgatgagctcgtccacctcgtcggcgcgggcggtgagcatgaggatgtagcaatcagagaaggtgcggatgcgacgcgccacctccacaccgtccaggctcggcaggcccaggtcgaggatcaccaccgaggggtcgaggcgacgggctgccgccaccgcctcgagtccgtcaccgaccacctcggcgcggtacccgttgcgggtgaaatagccggccatcacggtggccagcgagtgttcgtcctcgacgatcaggatgcacggcgcgtcgccgggggcgtcctgcacggcgctcacaaccgcaccacctcgccgtagcggggcaccacggccatcaggccgagctcctcgctgatggtgtcggccaggtgttcggcggacttcggctcaccgtgcacgcagtagaccacctgcggggccgggctcaatgcggccagccactcgagcagttcgggggcgtcggcatgcacgctgaaggcggtgtccagcaacacttctgccttcaccggcacatatcggccatacatcttgatctgcttggcgccctccacgagagatcttccacgggtgccgagggcctggtagccggtgaagaccaccgcgttgcgcggatcgggcagcatatggcgcaggtggtgcacgacgcgtccgccggtggccatgcccgaggcgctgatgatgatgcacggctgcgccggccggttgagcgccaccgactcctccttggtgcgcacatcgcgcagcgtcggcaggttgagcagggccgagatgtcgatgtcggcgcgcagctcggcgtgggccccggtgccctggtagacgtcaagtgccgccgagcccatcggcgagttgatgaagatgggcaccggggggatgcgtccggcatgctgcatctcgcccagcaccttgatgaggatctcggtgcggtccacggcgaaggccgggatgagcaccgagccgccccgggcgatggtgcgccggatcagtccggccagggcctcatggtcctcctcgtcgccggtgggatgttcccggttgccgtaggtcgattcgatgagcaccgaggtggcgccctcgggttcctcgcggcggcgcagcaccggatgctggtcgcgtcccaggtcgccggagaacagcaccgagatctgcgggtcgtcggccagccagacccggatgctcgccgatccgaggatgtgcccggcgcgggtgaagcgcgcatgcaccccgccgcccaggtcgaggtcgcggtcgaaggcgacgtcgtggaacagcggcagggagcgctcgacgtcggcctcgtcgtagagcggcagtggcggattgtgcttggaatagccgccccgtgcggcgtcgcgggcctcgttcacctgcaggttcgccgagtcgcgcagcacgatggcggtgagttcgcgggtctggggcgtgcagtggatgcgtccgtggaagccgtgcttgaccagggcgggaatgtagccactgtggtccatgtgggcatgggtgatgagcaggtcggtgatcgtcgccgggtccaccgggaagtcgtcccaattgcgacgacgccattcccgggcaccctggaacatgccggcgtcaaccatgagccggcgctcattgaggtcgagcaggaactttgagccggtcacggtgcgcgccgcgccgaggaaggtgagggtggccactggtttgctcatatccctactctgtcgcgcaccgccccgccgtgtccgccttgtacataattcggcgagccgccggaccaagcggagcgcatcaccgcagccgggggcgggctgccgttacactggcgcgtcacggcatcggggcgccgaccggtctttcccggtggcaacaattcagccgcggcttccttacgatatgaacagcgcgcgattgctcagcgacacaccgctgacacgtccttgccagaacggggattcgacatgacctcagatatcaacgccccagcagagatccttgccagcatcgggggcgccgacaacgtcgagaacctgacccattgcgccacccgcctgcgtttccagttgcatgacaactcgggcatcgacgagaagcaggtggagtcgatccccggcgtgatgggtgcggtctcgcagagcggcaaccgctaccaggtggtgatcggcggggcggtcgagagcgtctacaacgacatcatggcgctgcccgagatgaaggagggcggctcggcgaccggcacacagaagtccggcagcaatgccgacgtcaagagcgctgccaaggagaagggcccgcgcggcaggttcacctggctggacagcttcttcgacttcctgggtgattccttccggccgatcctgggctcgctgctgggcgcgtcgctgatcatcaccttcatggcgctgatgggcaccctgggcgtgatcggcaactgggccgatccgcgcaccgagctgtcgcccacctggcagttcatcaacctgtgctggcgctgcgtgttctacttcctgccgctgatggtggcctacaacgcgtccaagaagctcggcgccgacccgtggatcgggtttgcggtgatggccgtggtgatgctgcccgggttcacctcgctgggccagtacgccacccacctcaccttcgccggttccgagatcaacgtggtgcggctgttcggcggccacctgccgctgacgatcttcgactacggctcgcaggtgttcccacccctgttgatggcggcggtgctggggcccttgtacaagctgctcaagaagatcatctcgcccaatgtgcagctgatcttcgtgcccttcctgtcgatgctcatcatgattccgctcaccgccttcctcatcgggccgctgggcgtctatgcgggcgccgggctggccaatgggctcaaggcggtcaatgacttctcgccgttcatcttcgcgatcctcatcccgatgctgtacccgttcatggtgccgctgggcctgcactggccgttgaacgccatcatgctgctcaacatccagacgctgggcttcgacttcatccagggcccgatgggtgcctggaacttcgcctgcttcggcgccaccgccggcgtgctgttcctgtcggtgcgcgaccgtgacgtgacgatgcgccagaccgccaccggcgccctggcggccgggttgttgggtggcatctccgagccgagcctgtacggcatccacctgcggttcaagcggatctatccacgcatcctggtgggctgcttcctgggtggcctggtgcagggcatcggcggcggcctcaccacgaacgccttcgtgttcacctcgctgttgacgattccggcgttcagcaacatcccgctgtatgccatctcgatcgcggtggcgttcttcagctcgatgttgctggtggtcttcttcgactaccgcacggccgacgagcgcgccgaggctgccaaggtgcgcgccaccgaggacgccgaccaggccgccgaggaggcccggaaggcgagcgccgaggcccacaaggccgagctgcgcgccgacgacgccgaggcccgggccgaccaggccgagcagcgggcggccaccacgacggtggcagccgaacgggccgcgcaggtcgcgacggccgtggccccggcccgcaccgccctggcccccaatgcggtcacgcagatcgcctcgccggtggccggctatgtggtgccgctggacaaggtccccgatcccgtcttcgcgaagggcaccgtgggtctgggcgtgggtatcgatcccaccggggacacgatcacctcaccgggcgacggcaagatcatcgtcgcccaggacaccggacacgccttcggcatcaagctcgacaacggcatcgaactgctcatccacgtgggcatcgacaccgtcaacctgggcggcaccggcttcgacgtccacgtcgcccgcggcgaccgcgtcaccaccggcgacgtcctcgtccgcttcgaccgcaaggtgatcgaatcagccggctactccatgatcacgcccgtgctggtcaccaacccgcgcaagttcgcctcggtcacccaggccccggcgacgctgtcgtcggcgctggtggcccccggcgacacgatcatcaccgtgacggccaagcccccgaaggacggagccgccgcagcgcccggcacgccgccggcaccggcccatcgcagcgccgcgcaggcggttgccgccggcgacagcaaggccggggcgagcgcgtccaccgaggcgcccgggtcatcagtgggcggggcatcagtgggcggggcagcggcgggcgggtcccccgctcccggaagcaccgtcccgggggtttccgcacacggggtttccgcgcacggggatgcgcaggccagtccgcagggcactggcacagcggatggggcgcgacgggctgccaccaccgcgggggctgcagattcatccggcagtgctgctgcgtcgggcgccgcgccgggttcggcgctggtcgccggggcggtcaccgagatcggctcgccggtggcgggtcgcgtggtggcgttgtcggatgtgcccgatccggtgttcagcaagggcatcgtcggattgggtgtgggtatcgatcccaccggggacacgatcacctcaccgggcgacggcaagatcatcgtcgcccaggacaccggacacgccttcggcatcaagctcgacaacggcatcgaactgctcatccacgtgggcatcgacaccgtcaacctgggcggcaccggcttcgacgtccacgtcgcccgcggcgaccgcgtcaccaccggcgacgtcctcgtccgcttcgaccgcaaggtgatcgaatcagccggctactccatgatcacgcccgtgctggtcaccaacccccgcaagttcgcctcggtcacccaagctgcgcagggcgcggtcacgccgggtgaggggatcatcaccgtgacggcgaagcaatgagttcgaccgaggccgtgagttcactcgacacgcgcatgcccgctacgaagcggagcaccacatcggggagtccttcgattctgtcgaggccctgacggacgacctgcgcgcctgaccgggtgaccggctccgctgcggctcagcgccccagggaggcggcggacagggtggccatgtaggtggcgtactgcgccagcgccagcgccaggccgtcgtcctcccaggactcgttggcgatttccttgccgcgacgccagatgcgcttctggtcgaggtcggggaaggccttgcccagcgcgtgggcggcatagagcagcgcgatgagggcgcgggagcggtcatcaaggtcggtggtaccgacgagtgcgccgctgagccgggcgcgcagttccagttccacggtgggatcggcctgcggatagcgggtgcgcgggatgagcccgagcagcttgccgtgctgggcccgcaggatgccggcgttcaccagccgttccaactccaggctgcgcagtgagcggggcttgtcgtcgcccaccgagacgccaccgctcagcgcggtgatggcctcgtcgtagctgcgtccggctgccagctcggcaagctcggccagcagggggtcctgcggcgccttctcaccgggcacgaaggtgcggttctcgccggtgccggtgaactcgagggcgcccatgcccaccaggtcgaccagctcggcggccgcaaccgtgtaatcgatggtggtcaggtcctggcggaagccacccttgtggtcgtcgagcaccaacagcaggtactcgccggccagatcgaccgtgtgttccatgacgacccccctctttgcgggacattctcggtacgggacgtgccctgtgcgcgacaggcacccggcaacggtgttgtcacccagtatcgcgcagcagggaagcggccgggtcgggggacctcagtccttgggcgtgaagacctcgcgtccacccaggtagggacgtagcacctcggggatcaccacggaaccatcaacctgctggtagttctcgaggatcatcacgatcatgcgggtcatcgcgcacagcgtgccgttgagcgtcgccaggggcgtcacctgcttgccatcgcgcatgcggatgttgagccggcgcgcctggaactcggtgcagttcgaggtggacgtgatctcgcggtacttgtcctgcgagggcacccagccgtagcagtcgtacttgcgcgcggccgacagccctaggtcgccggaggcgacgtcgagcacctcgaacgggatgccgagcgcgctgatgaactccttctcgtgggccagcagccgctcgtgctcggccaccgcgtcctcgggacggcagtaggtgaacatctcgaacttgtcgaaccagtgcacccggaagatgccgcgggtgtccttgccgtagctgccggcctcgcgacgataggccgggctgaatccggcgtagcgcagcggcagttccttggaatcgaggatctcgtcggagtggtaggcggccagcggcacctcggcggtgccgaccaggtattggttgtcgcgctcgaggtagtagacgtcgtcggcggcctggccgaggaacccggtgccctccatggcggccgggttcaccagcgccggcgggatcatcggggtgaggccccattccagcgccttgtgcagcgcgaactggatcagggcgaactcgagcatcgcgcccgggcccttgaggtagtagaagcggctgcccgacaccttggcgccgcgctccatgtcgatggcgtcgagcatctcgccgagctcaaggtggtcgcggatcgtgatgccctcaccggcgaagtcgcgcggcgtgccctcggtgtcgatgacgaacaggtcgtcctcgccgccctccggcacgtcctcgaagacgatgttgccgaactgcttgaccacctcggtgtagtgctcatcggcctcgtgggccgacgcgtccagctcgcgcaccttcgcggccagctccttggtgcgcgacagcagcgcattgcgctcgtcgccggaggccttggcgatcaacgcgcccagcgacttctgctcggcgcgggcctgctcgaaggcgctgatcgacgagcggcgcgcctcgtctgccgccagggcctggtcaacaagctcgacggactcgccccgggcccgctgggaacggcggacgcggtcaggatcggtgcgcaacaatttcgggtcgatcatgggctcaaggttagcgttcgcagcgcccggccagcgcccccgtctgcgcgcgtaccgcgatccggtggggcgcgtggacgtgcccgggccgccacgagctgccggtgccggatgtgcccgggttgcatgctctgggagaatcgcgatgtgaccacccgaccgttcagccgcttcactgcgtgggcgactgcggtcttcaccgcctgcttcctggcctggacgcgcctgacgctgcgcacccaggtgttcgcggggctggacgcctcgagcaatgtgccgcgcctggtgcgtgactccccggtggcccaggtggcgtccgcattcgcgatcgtggcgcatccggcggtgatgtgcctgctgctcgtggtgatcgccatctgggcgtggcgacgtcgcctgcgtcacctggcggtcacctcgctggtgtcgggcgcgctgacgatgctgatctgccaggccatcaaggcgtcggtgaaccgggcccggccgccctcgccgatggccgatgcgatcacctaccaggggtcgtcgtatccgagcctgcacatggcgatggccgccgccaccgccgccgtggtcgtgggcgtcaccaccacgacgcgccagccgcgctgggccgtggtgctgtggcgcctggtcggcttcgccttcgtggtggcgatgggcttcgacggctggctgatgaacgcccaccacttcaccgacatcatcgcgggcgtcctgctgggtgcggccgtggtgagcgccgtcatgctgttcgcccgggtgcgcatgctgccgctgatcgccccgcggcatccggccaacgcggtgcgtacccgcggcggcctgtgcgcggtgatctacaacccggccaagatgcgcgacgagatggtgttccgccgccagctggtcagcgagctggccggggcgcactgggagatcccgttgtggctgcccaccaccatcgcccaacccggcgcggcacaggcgcgggaggcgatcgcccggggggccgacctggtggtggccgccggcggcgacggcaccgtgcgcgaggtgtcgggcgcgctggcaggcagcggcattccgatgggcatcgtgccctcgggcaccgccaacctgctggccaagaacgtgggcatcccgattgacatggaggatgccatctcggtggccgtgggtggcgagccgacgccgctcgacctggtgcggatggtcgtcgatgcgcaggctgacaagcccctttactttgcggtgatggccggcatcggcttcgacgcgcgcctgatgcagcgcaccaatgagtcgctgaagaaggcgctgggtgcggctgcctatgtgttctcggcgatgcccgagctgttcaccaagccgcaccgggtggagatcagcgtggacggctcgaagcagaccaggcgcaatgcggtgctcaccgtgatgggcaatgtgccctcgatcggtggcggggtggagctcatgcccgacgccgaccccaccgacgggcgcatggagatggtggtgggttccccggtgggcctgtcggcgtgggcgcgtgcgaccgcgcaggtgctcacccggatgggtgccgacccgacgctggagcagtacgcgggcgtcgcgatgagcgtcgaggtggacgagccgatgccctacgagttggacggcgacctggtggggtcggggtcgctgttcgaggcggaggtggatccgggcgcgttgatgatcatgttgccgcccaggccctccagccaggcgccggcggcgcggtagtcggagtccttggcgcccaccgggacgttgggcagctgctggtcggcgcgggcatagctgcccaggaagatcacgtccttgcagacccgcttgagccccatcagggcggccgcgacgcggaagtcgtcgaggtgtccctcggcgtccatgttgaagcagtagttgcccagggtggtcttggtgggacgcgactcgatgcggcacaggttcaccccgcgcaccgcgaactgctgcaggatgctgagcagcgcgccgggctcgtcatggcgcatataggccaccagcgtggtcttgtcggcgccggtggccagtgccgggcggccggggcgtcccaccagcacgaagcgggtgacggcggcgtcgttgtcggcgatgtcggtggccagcggcacgagcccgtagaggcgtccggcgatgggggcgcagacggctgcgtcgaaacccgaatcggggtcggagaccgcctgggcggcagctgccgtggagccgcgttcgatcacctcggcgtcgggcaggtgcaggctcagccagtcacgcacctgcgcggccgcgtgcggatgggtgatgatgcggtgcacctggtcgagggtggtgccggggcgggcgcacaggtcgaaggtgacctccacgagcacctcctgcatgatctgcaggcgcggcgcgtcgaggctgcccaggttgtcgatggttgccgagaccgagccctccaccgagttctcgatgggcaccatggcggcgtcgatctcctcggcgcgcaccgcatcgagtgcggcggccacggtgctgaagggcgtcgcctcgtcctcgctcacgctgagcagggcctgatgcgtgaaggtgccctccgggccgaaatatccgagcatgggcacgagcctacggtcacctggcaaggcgcggaaagccgaggggtgacggcagggggtggggcgcggcgcggggcggggttcgattgcacgggctgggctcggacgcggtcggacgccgggtggcttgggtacggggtggcttgggtacggggtggctcggctacggactcggttgcacagcttcggttgggcactgggggccggggtggggtagcccccagtgccgccgatcgcccctgcgtctaccgcgctggtggggcacgttgaatactgcaggggcgatggaactggtcctgtcgtcacgtcgtcgcgtcacatcattgcgtccacgtcagcgcgtcagatcagggcgtcgcaccggacggggtgggtggtctcgggggcccgtccggctgatacgaacactaggcggcgcggggccggattgcgcgtcgcgggcgcaactggcgctatcggtgacgcagggcctgccccgacccgacccggtgttttctgggcacggatggcacgcggtggctttcgagggttgaattgagccatgtcccagcccatgccgcccgattcgtccggtcagaacgatcccgagggctgggtgcgcgatccgacggcgccgggtggatgggcgcccatcaggggctatcagccccgcccgggcgggcagcccggccaggggcaataccaggccccgccgccgttgcaggcccgccagccgatgcctccccagcatccgcaggccccgatgccgcagcaacgtccgcaggcgcccatgccccagcagccccagggccggccgcaacagccaccgcgctactccgacgaggcgcgtaacgatgcccgggcgagcctggaggccttcggcgagatggggccccagtactccgacgccgtgatcgattcgttcctggcgcgcgtcgactcccagctgggcgcgcagcaccagcagaacgccgagatcgagaagcggaaggcgaagcaggaggacaagcgtcgcagcggccgcaccgccgccctctcgatctcgctgggcatcgccatcccgctcaccgccatcgcgtccgattacgggttggtcggcatggccatggcttgggtgggcgtgctcctcgtggccttcatcaccaccggtttcaagtggggacgcgacgacaagtagttccgtcggtcgaccggcgatccgtcatcgggtcgacgcgccgtgtcgatttccggttgtgtgcccccgcaacccgcgcaagctccactaagtggacacctgtgcggcgtcattcccgcacaactgcccacctagggggaaaagccggtcaccacccaggcgaagccggcaccgacgggtgtccacacggaacccccaccagcaacacacccagcaacacataaggggtcgggaaaagcaccatggacggtgcatttgtcgaccccttatgcgggatgccccgcgtcggccacctacagcgacggggaatagggccggaactggctaccccaccaatgacgccattcggcggtcgccacgaacggggccaggtgcatcgcgcggctgccgatcaccacgcgggtgaccggcgagatgccctgcaccgaattgaggaaccacacgccctgccccgagccccagtcgtcggtgcgggcgttggcgcgcaccacctgcatgcccagcgacgcggcccgacgcgccaccatcgtctcggtaacccccggtagcacgcgttcacggtgggccgggagcacgatcttgccctcgtaccaccacacgagcgagccggtggacgcctccagcacggtgcggttcgggtcggccaggatcgcgtcgtcgcagccgcgtgaggccgcgacgccccgcagcttgccgaggcgctcgatgtcggggcccttgacggtggggtgcaggcgcgggtcggtcaggccggtccacagcagggtggtgtcgtcgcgcatcggcgggcaggcgcggatgcgcagcacgaagacgggcccggcgtggccgccgatcatctcccagccgatgcgcgggaacaggtcctgtcccgtttcgaggccggcgtcgcggtgggtgtcatggtgggccgtcaggattgcggcgatcatggcgcgccgcatcgacgcccattcgcgggcgctggggatgggcaacccggcgtcgagcgcccagcgcgccacgcccgcctcgaagcgcaggcagtgcaggtcgaaatgggcggcggcgccgtggctgctgcgccaggaatcggctgccaggatgtcgagggccggctcgatggcgcgcacgtcgtcgacgaaggcctcgccgttccacaccagcgctcgcggggtgaaaggccgcctgactacgcccgatagttccgctccacccggcgtcagggggccgtcggacgcgtcatcggcgggctgggactcagtcatcgggctcgcctccttgatggtctgcggcatgggcgtcgcgtgccgcgcggtggacgccggtgtcatcatgccccgcgcccggcgcactgttcgcgtcgtgggtgctggatccaccgtacggcgctgggcgtccggccggggtgcccacacggcgcagggcgctcagcagggcggcggccttgagctccttctcgtcgaactcggcaggtgcctgcgagtccaacacgatcgccccgccggcaccaatgctcagacggtcatggttgcgcacgatggtgcggatcacgatcgacagctcggcgcggcgtccgtaacccaggtagccgagcgcgccggagtagatgccgcgggggccgggttcgagcgcgtcgatgatctgcagggtgcgttgcttgggggcgccggtcatcgagccgccggggaaggtggcgcgcagcagccccaccaggtcgacgtcgtcgcgcagcatgccctgcacggtggtgacgagctggtgcacggtggcgtagctctccacctgcatgagggccggcacgcggatcgagccggtgacgcacacccgccccaggtcgttgcgcagcaggtcggcgatcatgaggttctcggcccgcgacttcgggtcggtggccaattcggcggcgaggcgctgatcctcggccgggtcggctgacctgggggcggtgcccttgatgggcttggacgacaccagcccgtcgtcgcgcaccttgaggaactgttcgggtgaggcggacaacacctcgaggtggtcgccgaaggtgtcgaagcgcaggtaggcggcgtagggcgccgggttgatgcggcgcaggacgccgtagaggtccagggcatcgacgcccgccggatagggcccctcgaaggtgtcggtgagacagacctcgtaggagtcgcccgcacgcaggaaatcctgggcgcggcgcacgcgttcctcgtagtcagcgcgggtaaggcgccatgatccggcgatgcgagggggcgtgtcggcgggcgcggtgggagtcgccgcagcgtgtgatggtgacgggctcgatggcgtcgccccggcacggccgaggacgtcctccagacgcccgaaccagcgcgctgccgcgtcgtcgtcgccctcggcggtgagcacgagcaggtgtgccacgttggtggcgtggtcgatcacgatcgtcgcttggggacgcagccaatagccctcgggcgtcggggaatggcgggtgggatcgtcggggaacaccagcgccttggcctcatagccgaggtatccgatgtagccgccggcgaaggggatgccctcggggacctcaccgatgggccgcgccgcaagccgttcggccaacacgtcgaggatgtccccgtcgagcgtctggctgacccgtccggcaccgtggccgcgttgcaggcgggtgtggccggcgtcgtcgtggcggcagtagcgcagcacctccgacaagtcgccggcgtcggtgccgagcagggagaagcgtccccgctcggacgtcgtgccagccggccggggtccgacatgctgcgcaaccgcggactgcgcaaccgcggactgcgcgcccaccgactgtgcactgtcgagccagaacgcggcgctcgcaccgtccgacagcaggcggaagagcgcctggacgtcccacggtgatgtcccaggagccgggcgcactgagcggacatgcagttgcagccgggggccgtgcttgctgtgcaccatggtcaaggtcgtccacctctggtcgtggatacggccgccggagccgcgcacgaatccgggcacatcatgccacggcgcaccagtgtggccccggcggcccgatcggagggccgatccgccgggaattcttggcccccttgagcatctgagacgcaagccccggcaccgcgcggcacgcctaccatcagtacataacggacgggttacaagtcccagaggttcagtcaaggggagattatgaagtatgcagtgatcggcgccggcgcaatgggataccggtatggcgtcctgctccaggaaaatgctggcgtggatgtcgacttcgtcgatacctgggagccgaaccttgccaaggttgccgagcagggcggggtttatgtctcgcgcgaccatgagggacgacaccttgtgccgatcaacctctattcccccgaggattacaagggcaatcccgatgtgtggatcatcttcgtgaagcagatgcagctcgaaggggtgctcgagcggtgcgcacacctgttcaatgacaagcaggtggtcttctcggccatgaatggatatgggcacttcgagaagatccagaagtacttcagcgacgaccgcatctacggcggcaccgcgatgatcgccaccgtgctcaacggccccggcgacgtaaacttcatcggcaagtccggcgctggtgagatgcacatgtgtgcgtacaccgagaaggtcaccgacatcgagaagaagatcgccgaggatttcaaggccgccaacctgaacccgatcatcaccgagaacttcatgggcacctgcatggccaaggtgatcttcaattccgtggtcaacacgctgtgcaccatgtacgagatcacgatgggccagttcatcgaattcgatggcgccatggcaatggccaagcagctgatcgacgaggcctatgacgtgtgcgatcgcgccggaattcgcctgatcgaaagtcgacaggacgagctgaagtcaattgactatgtgagccgcgtcggtaacccgctgcattacccgtcgatgtatcaggacatgtcgaagggacgccccaccgaggtcgactacatcaatgggtatatcgccaagctcggtcgcgagaatgactacccggcacggacccacgaattcctgacccgcggcgtgcacctggccgagctggcctggcacatccacaaggaagaggccgagaaggtcgaggcggagcaggccgcctgagcgatcaggccggaccgtccgccggtcaactgcaaccggaacacctcgcgcggctgcagtgggcccggacacaaccaagggagtcgggagcgcaacgctcccggctccttcacgtccgggccctcctgcgcatgcgtccagcacatatgcgggatcattccagtagtggccccccaccacatcgcagcaaggagttgacgcatgcgcgcactggttgtcaaggagttccaggagctcgtccgtgaccggcgcacgctggccatgttgttgctgttgccgctgttgctgctcgtgatcttcggctatgcggccaacttctcggtgagcaaggtgtcggtgacggtgatcggccgcgacgcccccaccctggccgcggacttggcgcagtatccggtggcgggccagagcctggacatcagcaccgacgccgacgccaccgatcccgagcagttgctgcgcgagcgtcgcgccgatgtggtggtgcaggccacggacaccgccgcggcgccctccaccgcagcaccagccaccgccgcaccgatcagcgagcgcatgcacgtctatgccgacggctcacgcctgttcagcgcccaggcggcgcagcgggcgttcaccacgctggttgcccaggacacccagcagcacctggcccggatccaggcctcggctgctgccggcgcgtccgggggcagttcggcgcagggcagtgccgcggtgggaagcgccgcacaggccgcgtccaatccgggcagcgtggtgactgtgctgttcaaccctgacctgaagacctcgtgggtgatggtgcccggcctgatcgggttgatcctcacgttcatcggcaccgtgatcacctcgatcggcctggtgcgcgagcgcgagaccggcaccctggagcagctggcggtggtgccgctgcggtcgagctcgatcatcctgggcaagatcatcccccatttcctgctggcgctgttcgacatggtgctcatcaccgcggtgggcgtgtggctgttcggggtgccgttccgcggcagcttgttgttgttcgccgcggcggcggtgatcttcctgttcgtggtgctgggcttcggagtgttgatctccaccgcctcgcagaccaccggacaggcaatccagctcgcgatcatgaccgtgctgccgcaggtgctcctgtcgggcctgatcttcccgctcgactcgatggcagccggggtgcggtggatcggctactgcctgccgctcacctggttcaaccagattgcgcagggcatcatgctgcgcgacgccccggccggctccctgctgtggcccttcgtgatcctagcggcgatggccgtggtgttcttcggcatcgcgacgttgcagatgcgcttctcgctgacgcacgggggcgcgcgggcatgatcacccttcgtggcgcgtcggtgcatttcggcgcacgggcggcgctggacgatttctccggctcgttcgcgccggggcaggtaacggcccttgtcggcggtgatggggccggcaagtccaccctgctgcgggtgctgaccggccgggtggcggcgacgccggcgcaaccgggagcggtgacgccacgcacccaactgggctatatgcccgccgacgccggggtgtggaacaacctgtcggtggcgcagaacatcgccttcgtggcgagggtcttcgccatgtcgtccgagcagacgagggagcgctcgcagctgctgttggcccgcgccggattggcgcaggtgggtgatcgtgaggccggcaagctgtcgggcgggatgcgtcagaagttgggcttcgtgttggcgacgcttcactcgccgtcggtggtgttgctcgacgagccgaccaccggcgtcgacccggtgagccgcggcgagatctggtcactcatcgcgggggcggccgccgagggggccacggtggtgttcgccaccacctacctggacgaggccgaacgctgcgaccagttgttcctgctcgatcagggacgtctggtggcgtcgggcactcccgacgaggtgatcgcgtcctgccccggcacggtgtggcaggcacctgccggtgcgggtgcgggtgcggccgacgatgtcccccgggcgacgagttggcgtcgcggcgaccagctgttcgtctggaccccgtcggaccgggaggctccggccgggttcacggcgtcggtgcccgatctggagaacacgtcgattgcgctgctgctggccggcggggcgacgctgggtgccgacagcctcgacgatgccgccacggcgccgggccatccacgagcctcggatgcgccggtggtgttggcgtcgcgcgtgacgaagaccttcggcgacttcacggcgctgcacgatgtgtcgctggcggtgcatcccggcgagatcgtcgggctgttgggcggcaacggggccggcaagaccacgctcatgcggtgcgtgctgggcctggagcaggtggcgtcgggccgggtgttgttgttcgggcaggtgccgtccatcgcggtgcgtcgacggctgggttatgtggcgcaggggctgggcctgtatccgacgttgagtgccaccgagaacctgcgcttcacggcgcgggtgttcggtgcgcgcagcggtggtcgggagttcagtgcggcgcgcggggcgcgggacggtgtccggctcggtgagcgggcccttgcctatgcgcatgacctgggacgcggcccggtgggcgcgttgccgctgggggcgcgtcgcatgttggcctatctgtgtgcgatcgagcatgaccccgagctgttgatccttgacgagccgacgtcgggcatggacccgctgtcgcgtgcgcggctgtggcgcgagctgcgcgaggtcgccgaccgtggggtgggcatcctggtgagcacgcactacatggccgaggccgcgcagtgtgaccgcctggagatgttgaccgccggacacgtgagcgcgtcgggttcggtggccgacatcaccgccggacgccggtcgctcgtggtgcacgcgccgcagtggcagcgcgcgttcaccctgctgcgcgacgcggacctgccggtgacgcttgaccgacgcatgctgcgggtgcccggagcgtcccgcgacgagctcgcgcgcgtgctagaccggttggatggcggctactcgatcgccgaggcggcgtccacattggaggagacgatgatgcttgccgagcggggtggggacgcgggcggcaagtgaggggctgagcgtgctgccccggaaaatgtccgacccagctgggatacttcacccgtgactgagtcgacgaaggaatccgaacgtgcagagctgcacaagaccatctggcgcatcgcgaacgacctgcgcggcagcgtcgatggctgggacttcaagagctatgtgctgggcatgctgttctaccggttcatctcggagaacctgaccgcctatatcaacaagggcgagcatgcggccggcgacgtcgacttcaactacgccgacctcgccgactccgacgctgcgatggcactgcgggagacggtggatgagaagggcttcttcatcctgccctccgaccttttcgagaacgtgcgccgcgacgccccgcacaacccgaacctcaatgagacgctcgccaatgccttcgccaatatcgagaattcggcggccggcacgtcgtcggagggcgatctgaagggtctgttcgatgatctcgacgtgaacagcaaccggctcggcaactcggtgatgcagcgcaatgagaagctggtgaagctgctcgacgcggtgggcgatctgcccctgggcaacttcggcgagcacacgattgacctgttcggcgacgcctacgaatacctcatgacgatgtatgcctccagcgccggtaagtcgggcggggagttctacacgccccaggaggtgtccgagctgctcacccgcatcacggtggtcggcaagacacacgtgaacaaggtgtacgacccggcgtgcggttcgggctcgctgctgttgaagttcgggcaggtgcttggccagggcggtgtgcgcaagggctacttcgggcaggagatcaacctgtccacctacaacctgtgccgcattaacatgttcctgcacggcatcaactactccgacttcgacatcgccctgggtgacacgctcaccgagccgaagcactgggacgaggagccgttcgaggcgatcgtgtcgaatccgccctattcgatccactgggccggaaacgacaatccgacgctcatcaacgatccgcggttttctccggccggcgtgctggcccccaagtcgaaggccgacctggccttcaccatgcacatcctcagctggctcgccgtcaatggcacggcggcgatcgttgaattccccggcgtgctctatcgcggcggcgccgaacgcaagattcgcaagtatctgatcgacaacaactatgtggacacggtgatccagctgccgccggatctgttctttggcaccacgatcggcacctgcatcatcgtgctgaagaagtcgaagcgcgacaactccgtgttgttcgttgacggctccgcggagttcgtacgccccggcaataagaacaagcttgatgacgcgaaccgccagaagatcctcgatgccttcaccgcacgggaagatgccgactacttcgcgaagctcgtgcctgctgccgagctcgctgacaatgactacaacctgtcggtgtcgtcgtatgtgcagcccgaggacactacagagaagatcgacatcaccgagttgaatgcccgcatcgccaagatcgttgcccgccaatcagagctgcgcacccagatcgacgcgatcgtggccgaccttgaggacgcacagtgagccggatcgaggagctggtcgagcgactctgccccgacggggtcaagttcgaaagtgtcgacatgctagccgaagtcggcacgggcaatagcgacaggaaggatgcggtagaaggtgggccgtacccgttctatgtcagatcgcagaaaccaatcgctatcgacacctatcagttcgatgatgtctctataataatccccggagagggaggaattggagatattttccatatcacccacgggaagtacgcgcttcatcagcgtgcgtaccggattcattttacttcggctgacatagatacccagttcgcttattattatttttcgtcccacttcaagtcattcataatgtcgcgggccgtaagcgcaaccgtcacatcaatcaggaagccgatgatcttgaaatttcagatcccgctccccccgcttgtggtgcagcatgagatcgtaaagattctggacacattcacagacttggaagcggagctggaagcggagctggaagctcgccgcgcgcagtacgagtactaccgcgaccagttactgtcattcaacgagacccccccccagatcaggtgggtcacgttgaatgatacgggcatcttttactcgggactgaccggaaagaccaagagcgactttgatcgaggagagtctctctttatcccctatatgaatgtgttccagaacccgacaactgacttaactgatacgcgccacgtttccatcggcccagatgagcgccaaaacagagttcaacatggcgatattctgttcaccctttcctccgagaacctgaacgaatgcgctacgtcatcggttattcgggggcaacctgaggccaatctattccttaatagcttctgttttggcctgagaccttcccatactgacggcctggacctcccctatctatctcatgtctttcgctcccgagccttccgcaaggagattcctaaggctgcagcgggggtgactcgctttaacgtgtcccgcacgagattcgggaaattgatgatccctatccctccattggatagacaacgcgcgatcggacgcactctagattcctttgacaccctcgttaacggcctcacctcggggctcccagccgaacttaacgcacgtcgtcagcagtacgagtactacagagacaagttgcttaccttcaaggagctgaagtcatgaccgattcctatgcggctccacgctacgcaccgatcgccgtcagcaacgaacgcaccgtcgttgcccaatatgttcctgagccctccgacgatgatcagggctatgagagcgaagctgcccttgaagcacacttcatcaagctcctgcaggagcaggcctatgaatacttgccgattcacagctccgacgggcttgtcgcgaacctgcgggcgcagctcgaagcactcaaccaggtcaccttcagcgacgacgaatgggcccgtttcttcgccgagtcaattgcaggaagccgcgacggcatcgttgagaagacccgccgcatccagcgcgagcacatccagttgctgcaccgcgacgacggcaccgacaagaacattctcctgctcgacaaggaccagatccacaacaatcgcctgcaggtgatcaaccaatacgccaccgattcgggcgcgcggtccaaccgctacgacgtcaccatcctggtgaacggcctgccgatggtgcaggtggagctcaagcgccgaggcgttgccatccgcgaggccttcaaccagatcaaccgttaccagcgcgacagcttctgggccgactcgggcctctacgaatatgtgcagctattcgtgatcagcaatggcaccttcaccaagtactactccaacaccacccgcgccactcacgttgaccaggccgcgggctccagccggtcgcgcagccaggtgtccaacaccttcgaattcaccagttggtgggccgacgccaccaataaggccatcaccgatctggtcggattcacgcgcactttcttctccagccacactttgctggcgattctcacccgctactgcgtctttgattctgacaacaagctgttggtgatgcgtccgtaccaaattgcggccaccgagcgaatcctcaaccgcattgagacctccaccaacgcacgccaggtgggcacggtcagggctggtgggtatatctggcacaccaccggatcgggcaagacgctcaccagcttcaagacggcgcagctggccatcgatatgcccaccatcgacaaggtgctgttcgtggtcgaccgcaaagacctcgactaccagacgatggtcgaatatgagcgcttccagaagggcgcggtgaactccaacgcatcgacccgcgagctcaagcgccaactcgacaatcccacagccaagatcatcatcaccaccatccagaagctctcgcgctacatcggaaagaaccctgacagccgcgtctacgacggccacacggtgatcatcttcgacgaatgccaccgaagccagttcggcgccatgcacgaggcgatcaccaagaccttccgcaattaccacatcttcggattcaccggcacgccgatctttgcccagaactcaagctctgccgggtcgccagcaatgcgcagcaccgagcagatctttggcgaccggctgcacctctacacggtcgtcaacgccatcgacgaccggaatgtgctgcccttccacgtggactatgtcgacacgatcaaggtgaaggccgggatcgtcgatgagcaggtggcaggcatcaacagcgaggccgcgctgctcaatccgaagcggatcaatggggtggtcgactatgtgctgagccacttcgaccagaagaccaagcgccagcagtcttattcgcttaaggaacggcgggtccggggattcaactcgctgtttgccacggcctcgatcgaagccgccaagcgctactacgcggccttcaaggcgcgccgggccgagctgcctgccaccagcgagccgctgaagatcgcactgctctacagcttcgctcccaacgaggcccagcccgacggcttgctcggtgaagaggacttcgagaccggaagcctggaccagtcgtcgcgcgacttcctcgacgatgccatcgccgactacaacgcgatgttcgccaccagctacgacaccagtccccagcagttcggtgactactacaaggacgtcacgcggcggttgaagaaccgtgagctcgatatggcgatcgtggtgaatatgctgctcaccggcttcgacgccaaaacgctcaacaccctgtgggtagacaagaacctgcgccagcacggccttatccaagccttctcccggaccaaccgcatcctcaactcggtgaaggccttcggcaacgtcgtctgcttccgtgacctccaagatgagaccgacgaggcattgaggctcttcggcgatgaggatgctggcggcgtggtgctgctgatgccgttcgggcattactacgcgcaatatcaggagatcacgcacgacctgctgacccagttcccgaacggggaaccgatcatcggggaagacgccaagaaggagttcatcaggcagtttggtgcgctcctgcgcacgatcaacatcctcagcgtgttcgatgagttcgagggacaggaactgctgacccaacgtgagatggctgactaccagagccgctatctcacgctgcgcgacgagttcgtgagtcatcttgacgccgagaaggaatcgattgacgacgacgtggtcttcgagatcgaactcgtgcgccaggtggaggtgaatgttgactacatcctcatgctggcccagcagtacctcgaggtgaaggacgggccgcgcgacaaggagatcaacgaaatccgcgccaagataaaccgggatgccagcgccagccccaccctgcgtaacaagctcgacctgatcaacgccttcgttgactccctcaatgtcgactcccacgtcggccaggaatggcgcgaattcgtcgaaggccaccgcgacgctgaactcgaagagatcatcgccgaggagagactcaggccagaacccacgcggcgtttcatgcatgacgccttcatcgatggggcaatcaccacaacgggcactgcggtcacgcgcatcctgccgcccgcctcacggttctcgaagaccaacaaccacgagcagctgaaggatcgagtgctggccaagctgcaggcattcttcgaccgttatgccggattgttgaaggacgtgcgggactgggactaaggcggggccgcgccaccggctacaacgggagctgacccggttatcgtccatgcgttcgatataatcggtggcgtcggcatactgctaggagatcgaaatggcctttcagtccaagctccacagccctgatccacccagacgcgtgagcgcgcaagaactggcgcaacaacttcaccgcccagtggaagagatcatggctgcggcgcacactatcggagaattcgtcgagtccccccgcaaacgaacgcttgagagccccaccgttaatcagattcgtgcggagcttgatgagccgcagacgcccgctccgatcaagccgatcccccaatgggagcgacgaggcaccgcgccgacccgtaatacacgaggaacgagccaagcagtcctaggctctcgcttccatggcgagccggtactccgccgccgggaccgtttcgaaccatttcggactgaatcagctcatgatggtggcctccgagagacaaccgatgacgttgccatggcctgggcaagcgcctcatggtccttctttgggttcgctgaggtcgagaaggatgcatggatagccgcaggagttcaaacaacgcaggccaagaaggcatcacttttccgcgaggcgggactcctccccagcgatttggggaaaactcttcatggatggtcggtgatccggcggctcaatgccgatgaatccccacgggacattaggcagatgctggatcgtgaagcccgtaaagctgcttaagccctcaaagtccgaatcaccggcacacccctactccttaccggcaatcacctcgtcgtagacctcctcgaagcgcttgcgcagatcgtcgtaatagggcgcctgcgagggatcgggattgttcaccgagtgctgcggcgcggtggcgaactggccgtcgggattgatcacgctcagcgccatcatggcggtgccgcgcatggtcatgcgctccatattcaccacgtgcaccggatagcccagcgcattggtgatcacgtccagcgtcgccgggaagtgatgcgtcaccccgcccgacgccaggatgcgttcgatgttgacgtcgatgctgcgcaactgctcgaagatgcgtcgatagctgatcgccacgccctccacagtgccacgccacatgtcccacggcccgctggccgcggtgactccgcagaacaccgcgcgcgcattgcccgaccagcccgtcgcccgctcaccggtgaggaagggcagcaccagcggcgtgtcgggacgcggcgccgcacgcagtgccgtgtcgcgctcggtggcgtccaccggcgcgaaggtggtggtgagccaggtcatcacgcggcccacgtcgttgagcgccccacccacgatcgactcgtggcgcgacacccggtaggcccacaggcccgagggcaacttctcgggggtgccgggcacgatcacccgcatcgcccccgacgtggcggccgacaacgccaccgtctcggcgccgacggcacccacgccgatgttcgacgcatagccgtcggggatcgtggggaaccacttcgcgcccgacagggcgggccagcggtcattgatcaggcccggatcgggggtctgcggctggtcgggatcgacgatctgcgcatactggtcggcccgggtgtctgtgacggacagcaggtagtcgtcgagctggccggaatggcggttgagcatgccggcccaggccatcgtggaggtggcgcaggcatcgacgcccgccagcttggtgaacacatattcacccagcgagacgaacctggcggtgcgcgcccagaagtccggatggttctgcttgatccacaacaggcgcggcggatggtagctggtgtgcagccgcacgccgaccgcctgctgggcctcgtcgaggtcgagcaccttgcgcaattcggccagctgcggcgccgagcgcgaatcggcataggtcatgcacgggctgatcgcccgaccctgcgcatcgacacagatcagcgacgccgcgaaggtgtccatcgccacggcgctcacggtgccgggctccaacccggccagggccccggtgatggtttcggccacctcgtcggccatctggtcggcgtcgatctccgaggtgccgtcggcaccctccacgaagtggtgctcggccaccgcgttctgctcgagcacgggacgcgccatcgcgtcgtagagcgccgcgcgggtggacgtcgacccgatatccatggccagcacgaacggaccgatcgcgcgcgcgaacggcacggggcgggcttcggggatctcagtggtctggtttccgggcatcattgtctcggtcatggtgacctccttgctcggcatcctacgaggacgcccccactcgcgggaccattcgcgcacaactaatccctcgcgcggcgccggcttcgtcacaagcacaatggcggccacgacaaggccgaacgcccccggggcagacgcgcgccacaccggccccacccgggcacgcctgctgaccagcgcacctgctgcgcgagacatccgctgcccggcacatccaccgcccgccacatccgccgcccggcagcaccgccagcgctatttgagcagcttgctcatgcgacgatcggccagcttcttgccgccggtctggcacaccgggcaatactgcagcgacgagtcggcgaagttcaccgacgcgatcggcgtgccgcacacggggcagggatcgccggcgtggccatggatgcgcagctgggcgcgcttgtcggccttgatgtccctggcggccagcccgcgcgcccgctcggtagcggcggccaggccgtcgcggatggcagcatacagccgctcgacctcgtcatcggtcaggttggcggccggcttgaaggggctcagctttgcgtcgtgcaggatctcgtcgctgtaggcgttgccgatgccggcaatcacgtgctggtcacgcaggatgcccttcaactgggcgcgcccggcccctgccaggatctgccggaacaccgccggcgtgaacccgggcgccatcggatcgggccccaggctggcgatcgacggcacctgctgggggtcgcgcacgatccacacggccagcttgcgttgcgtgccggcctcggtgaggtcgaagccggcgccaccctgcagccgcacccgcagcgcgatgcggctcttgcccggcttgatcacggtggacggcaccttctcgcgccacaccagccagccggcccgcgccaggtggaacaccaggtgcaggcccccggcatccacgtcgaggtgcttgccgaagcggttgatggcggtgacggtgcggcccaccagcgcatcgggcggcgggtcaaaggtcttcagcgcgctgatcgcgcccacctcgaggcgttcgatcaccgaacccaccagatcggtgcgcaggaaatcggccagggcctccacctggggcagctcaggcatgggaacctccttgcgccgggggcagggcccggccacgcgtgaacacgcccggcgccggccaggctgtctcgggggcatccagcgcgtcgtcgagtagttccaaatagcggtgccgcgggatctccactccacccaggctcgccaggtggggcgtcaaccactgggtgtcgagcagggccttgccgtccggacgcgccgacagcgtgtccaccagccgcacaagggccaccttggacgcatcgcggccgtgctcgcggtcgtggaacatggattcgccggcgaacaatccgcgcaggcccaccccgtacaggccgccgaccaggcggttgtcgtcgtcccaggtctccacggagtgcaccacgccgcgctcgaacagcccggtgtagatggccttcacgtcgtcgtcgatccaactgccgggacgtgtggggtcggcgcagccggccagcacctcgtcgaaggaggtgtcgatggtggtgcggtagcggcgcagggcctgccgcagcgaatggctgacgcgcaacgagggcagcgggatgatgccgcgctgcatcggcgaccaccagcccatgccgtggaagtcggactcgtgcaggggcatcgggaacaggcccgaggcataggcggccatcgtgaggccggcgtcaatctgctcggtgaagcccacgaggtcctggctgggccagctggcctcgggaccgaagacatgggcaagcatgcttccagtgtggcactggcttctgacagacgggacggggaacccgccccaagcctctgacagacgggacggggaacccgccccaagcctctgacacacgggacggggaacccgccccaacgcctctgacagaccgcacggcagacccgccccagggacccatgacggaccgaacgggccgcccgtccaacagtccccccgactagttggacaaacgacccgctctcacgacgttgtctcgcgaccacggcgctgcttatggggcgccaaccactggctggcgcgtaagaccctgcttgatgattgtgcgttcaagcatgtccatcataggcgaaaggcccccatgacacgacattcggccgcgtgacggggaccaacacctagctgggcaagatacaccgccgggctacctgcgcacccacaccactgatccgtcgttgcccgagcaggtcgtgatggtggcaccggaggtgcagctgaccgccaccgaggtgccggtctgtgtattgcgcaacgacaccgtgggcccacccgcagcgggcgtggtgcccgtggccggagtgccagccgcacccggtgccgcgctgggcgccgtgagggtgccggcagccaatgcctgctgcacggtggtgccgaaggtgcaataggtggtgccgcgcttgacggccatcgtgccgccggaggtgcagatcaccgcattggcgtcgggcggccagacctccggggtcggcgtgagcgtcggagtgggggtgggcgtgggcgtctcactcggcgtgggcgtcacgctcgactgcgatgccgacgacgagcttgacgacgagttcagtcgcgtcacggccaccgcgatggccgcggcagcggccagtccgatgacgatcacgagcaccaggccgacgatgaacttgggacgacgacgcaggggctgtccgcgctgtggctcgggctcgggatgggcgcgctggggcgccggcggcacgggtggcggggtctgcgctccgcccatctgggccgcggcctgcgcgggcagctcctgggtgggggcctgctgcgcggcaaatgctgccgttggctgctgggccggtgcaccctgtggtgccccaccgggttgggacgctgccacttggtgggggacgggttggggcgcggcaccctggtgcggcgccggctggtcggctgcgggctgcccgggagcctgtcccgcggcacccgactgggggctgggctgctggcccggctgcccctgggccggctgcccctgggccggctgcccctggaggggctggccctgagcgccctggcccgactgatcctgacccggctggccctggacgggttgtccctgaccaccctggccctgggcggggccggcctgtcccgcggccgtctggccgccggcaacctgacccgcgtccgacggaccggatgcggcctgggtcggctgcgcggccgcctgttgggtcggcaccgccgcggcggcggccccgatcacggcgcccgcggcgagcacgccggcagccgggccctggaaccctgcaccctgcgcgccgggctggcccccacccacttggttcgggccgggctgattcggacccagttgattcgggccgggctggttcggggcgggcacctgccccacgatctgcggggccgtggtgggcgccgcacccgggaacgccatcacctgcggcaggggcgtcggggagggcgagacgtcaagcttcggcagcttcggggcgtcagcaagcgcattctgcagttccgacagccgccacgacagggcgtccgcgctgccacgctggcgcggatcgcggttcagcagcatcgacagcacttcccacagggcgtcgtccacgccgcgcggacggccgggatcgagcgtgaggatggcctgcatcgtgccctcgggctgcagcggcgcgaagggggtcacgccacacagcgactcgtagagcaccacgcccagggcatacatgtcggactggacggtcaccggatcgccggcgatcacctcgggcgacagataggccggggtgctggccagcacggccgagtggccgccgccggcccattcctcgacgatgccaccgacggcatagtcggtgaccttggccgaggcgggctgctgggtgtcgtcgagcaggatgttgctgggcttcacatcgcgatgggtcaggccggtggcgtgcagcgtcgccaggccctgggccgtttcggagatgatgcggcaggcctcggcgggcggcagcgtgccctcgtcgtcgaggcgggaacgcaggtcggtgcccttgatatagggcgagaccaccgccaccacgtcggagtcggcaaccatgtcgaccaccggcaccacgtggtcgccgcgcacggtggcgagcacgggacgctgggccagcaggtggcgcaccacctgtgggttcgaggcgaatcgcttgttgagcaccgtgaacgcgagctctgcaccgccggctccggtgccccgccaggtggtgccgaccacgccgtggcccagtggggtctccacctggtagttcgtgccgagccggaagggcttctcggcagatccgctgttgtcctgcgtcatggtgcacgtccttcttggggggagcgatctccctcaacatcatcggtggccgccccgtgatcgcacgtccgggggcgattcggccaccgcgtgcaggctatcaagccgcccactgccaccggcagcctgacgtccatcggtcccggggccacgcaccccgcgaacggtggcagggcccgcgccgcccccgacaaggggctgcgggaccccggacatggtgagggccccgcagccagagactgcgaggccctaccggacgctatggacgttcagtggttgattcggggggacttacgaacgtgcgggggtgaggatcagacgttgagggtctcgcccgcgtagatgaggttggcatcggtgatgttggacttgttggccgcgtacagggcctgccaggtggtgccatgggcagctgcgatggtgttcagcgtgtcgcccgactggacggtgtagttgccaccggtggaggcagcgcgcgcaggagtgtaagtggactcggtgcgagcggtgctgcgggtggtggagctggccgcgttgctggtcgaagcagcggtgccaccggtgttggttgacgtgtaggagccggcggaaccggcgttggcgccgcacacgggccatgcaccaatgccctgaccggcgaggaccttttcggcgaccgcgatctgctggtcacgcgaggcctggttggcgctggaggcgtactggccgccaccgtatgcgttccaggtgctggacgagaactgcaggccaccctggtagccgttcccggtgttggtaccccagttgccgcccgactcgcaggctgcgactgcgtcccagttcacgctgtcggcggacgcgttctgcccggcgatgacggtgatgctgccggcgagcgcggcaaccgaagcgacggatgcgatccgagagagtgtctttgacatgtccaccactatgaacccaaacctgagaaaaaccaaaactttggctcagttttctcaggaactggacttcccggagcgcgtttcccgtggttgtgagcgtgcaggatccagtgaacctgtgacaaacctgagagaatccctcagccatccgggcccgcgtgccatagcaccgggacgcctttcggctccaagtaccccccccccgtcgcccgattactcgccgggctgggagatgcggtcggcgtactcgcgccactgcacatagggcgggcccgtgtacacctgacgcggacggtagatgcgtccgttggggtcgttgttgatctcacgccagttggcgatccagccgggcatgcgtccgatcgcgaacatcacggtgaacatattgagcgggatgcccactgcgcgcaggatcaccccggagtagaagtcgacgttggggtacagcgaacgctcggcgaagtagtcgtcgctgagcgcctcggcggccagctcctgggccagcggcagcaacgggtccttgctgtcggtggcgtccagcagctcggtggcggccttctcgagcagccgggcgcgcgggtcgtagctcttgtagatgcggtgcccgaagcccgacaggcggatgttggactccttgtccttcacctgcgccaggaactgcttggggctcagcccctcattgcggatgcgctgcagcatctgcaccgtggccacattggcgccaccatggcgtccaccccacagcgccaccacgccggccgagcacgaggcgtacaggttcgcctcaccggaggcgaccatgcgcacggtggacgtggagcagttctgctcatggtcggcatgcagcagccagaacaggttgagtgcgtggacggcctgcgggctcgcctcatattcctggtagggcagcgagaacatcatgtgcaggaagttctgcgtgtagagcaggtcgcggcgcgggtagatcagcggctcgccgatcgaggtcttgtacgagccggcggcgatcgtgcgcaccttgctcatcaggttggccgcgtagcgctcgagggttgcatcgtcgtcaggggcgatcttggggcggtcgtgggtggagatcgcattgatcatggccgacaggatcgccatcgggtgggcctgctcggggaaggccgcgaagtgggcacgcatctgggtgtgcagcgccgcgttctgactgagcagctcgctgaagtgctcgcgctccagctcggtgggcaggcgcccgaagatcaccagccaggcggtctcaatgaaggtggagtgctcggcgagcgtctcaatggggatgccgcgatagctgagctcgcccttctcgccgtcgatgtgggtgatcgccgaacggcatgagccggtgttggcgtaaccctcgtcgagggtgatcagaccggtggtgttgcgcagcttgctgatgtcgatggccttctcacccgtgctgccctgcaccaccgggagttcatagacctcgccgtcgatttcgagccttgccgtctcgcccatctcgtcctcctcacccttttcattcgcctggtcgtgcctgtgtggtcgtgccttgttcgtgtggtcttgttcgcggccagccctgtcggccccgccctgcccggctccatcactggggcccgagatcactggggcctgaaccggtgcagcaggtgcccaccggcccgggacgtcggtgaccatgaatcgtcgatgagatggaacctgcatgtgtgcatgtcccatatccgtgcgcccacagtatcgccgggccactcacccacacggcgacgccagcaggcgtgcctgcccgccgatcgcccggatctgtgcaggtgcgccggatcgtcgccggcagggatgcgggacggaccgggtgtgcgacggacgagcatgcgggccaggcggcacctgcgccggggattggccggcccgcgcgcgatcagggcgatctgggtgacgcctactgctgccgaggattggcggtgcgactacgttggagggagctggacaggaggtatccatgcccactcgtaagaggtcaaacacgggttcgaccgtcggtgcaatcggtgccacggtcgttgccatggcccccaccattgctcccgggccgtcagcgaacctgctgcgccggttggcggactatgccatcgacggcgtgggtccgttgccgggggcgcgcatcgccgccgggcatgccctggagcacaagaccggggacgtcgaggccgcgctcgactcgctggtgcgcaatcacgtcgcgatggccggcgcgcagggcttcgtcagcaaccttggtggcgtggtcaccgcgattgccgccatccccgcgaacctggccgccgtggccgtggtgcagacgcgcatggtggccaccatcgcccacctgcgcggctacgacctgtcggacctgcgggtgcgcgaggcgatctggatgaccctgttgggacgccatgacgtggacgacctggtggctgccggcaagctgccgagcaccccgctgggcgtcgccaccgcccccgtgctggattcggcgctggagcagcgcatcgccgagcaggtgctggccaccctggtgggccgctcgggcggcaagcagaccctggccatgatgagcaagcgcatccccttggtgggcggcggcgtcggcatggcgaccgatggctggttcacctggaccgtggcgagctatgcccgcgatgtgttcgccccgcgccgcctgcccgaactgcccggccccgagcaggttgtcgacgaggaacagccggcaccgcagccggagtccgatgtgcgcgacgccgagtggtccgaggaggacgactgaggcgcgcgaagccacgtgaggatgggggcgggtgaagcatcgttgacggtgcttcacccgcccccaactcgtgtgcatcgttgaccgggacgatcaggtgcccggtgggatcaggcgtcaggcacgatgtagcgggcgacgagcccgagcacggccgcagccgcgatgatcaggccgctctgccagccgccgatcgcgatgccgatgccgtacagggccgaggcgagccatccgccactggcgatgaacgccatgatcgtgaacaacgagtagtagccgcggcgggcccgcgcggtgcgtgcgacgagcagcacggaaatggccgcgacccccagcacgcaggcggcgacgaaccccaaccagaacgcggtattgctcgacacccaggcgtccggtgggccgctgagcccccagtgctgcggcaccttggcgggcaggtcggcgaacaccgacgaccgcaacaccatcatcagcgcggccggcaccagcgccatcacgatcgccgccaccgtgcgggcgggatcgcggctgatccactcaccgggcggttcggcgcccagcacctcgtcggaggcgctggcggaatggccgtgcgcgccgactgccaccagttgctgctgctggcgcacgagcaccgccttcgacgcccggacgccgacgacggcggccatcgcgaccgctgcggtgagcgtcaccagccagacgaccgtgaacacgatggcgacgccggcgccgttcaggtcgtcgttgccggcgagcaccagtgcggtggcggccagcagcaactgcaccaggccgccgatcacgaacgccggggccgccgccacatgagccgcgtcccaggtgtcgtcattggtcatcgtggtggcggtgcggatgcccgcccagccattgcgcggcagggcgtgccgctgacccaggacgcccatcgcgatgagaagcaccgccgctgccagattcactattgccaacaggaccatgaccctgcccctttcggacccttgcggcgccatcgccgcaatgaagcaacgccttcacgctaggccggttccggttcggccgcagagggtgcgggcctttctcagcatcttcttccggggggtgggtccccaccagcactgcaccgctcgggaatcagacaggcgaccctcccccgcctcagtgggacgagcgtcggcgtcgatgcaggatcacaccgccggtggccaccgcaacgactgccagtgcgccggtggcggccgcgacccagacacccgcatgggtggacgtgcggacgggcgccgcgggggcctgcaccgcgccggcctgcttgctcaccgccggcgcggtgttggtggccgacagcctcatgcagtcggctccgccgtcggcacggcactgttgcaccgccgcccaggcgtcctgttggcgcaccagttcctgcttgaactggccggcctggcagggcaccttcatggtgacgtcgccgaactggtattcggtggtctgggcggaatcggccgcgcactgcgcgtcgtacatgtcggcggtctcgccgtgctcggcggcgcgggtgacctcctggtcgaggatcggattgacgtcggggtacccggtggggtcaacggcaagcagcttggtgaggtcaaccaccccgaagccgcgttcgtggccctcgtcgagggtggcggtgccgtccgagtcgcgggtattggccaccagcgactgcatgatctggttcccggtggcgtcgggccatttctgcagggccagggtgagcatccccgacaggttcgccaccgctgaagaggtgccgccgttggccacgtcgagcacgcgggtgtccatggcgggggcgatgagcacctcattgcccgggctcaggatcgccaccgagccatcggtggtgtccgaactgggcgccagcggaccggacggaccgatggagttcaccgtcaccaaccccggcaggcccgtcaaccgcgagggatcgcccaccatgtcgggcagtccgggctcctggctgttgtcgcgggcgctgaccatgatcacgccgtgctgcagggcgctgaggaagcccgggtagtcatcggcgtcgacgctggtgaggaacgacatgctcaccacgcgggcaccggcgcccagggccgagccatcggggccctcgcagctgttgtcggccacgtcgccgctgccgataccgcccgagttggcgaagaacttcaccgctgcccgcggcgcgatgccctcgaacccgggatcactgccgtagcccttcccgttgccaacgatccgcgaggtcatctcggtgccatgggtgatgaagatcggatcaccgggggcgtccgggtccatcgcctgccccgacttgaacgacgcgacgatcttctgcccgttctggtagcaggcgtcgtatccctccgagcgaccaccgggcgcgcgggttgactggggcaccgtgtcatagctgatattggcgtctgacaaggccggatagtccgataccagcgggctgtcgatcaccgagatggtgacgccggagccgtcgaggccctgcgcatgggcgtcgcgcacgccgaactggtcgaggtaccacaggccgtcgtcggcacgcgcaatggccgacgacgagaggcccaccgtcagggcgcacagcgccgcgagtacccgacccgcgagacggcgaccaccccgcgaccgacccgtccgcgctcggcgcgccgacccgatgcggtgcatccacccatccatcgcgcgcccctattcggcggcggaatcgaagtactggcgcgaaacgcgcggcgggatgaccgccgtcacctcgtagctgatggttccggccagctccgcgagctcgtcggtgctgatgtactcgtcgccgctggcgccgatgatgatcacatcgtcgccgcggtgcaccccgtggtcgtcggcctcgcccaggtcaagcatcgtctggtccatgcacacgcgtccggccaccgggaagctgcggccgttgatgagcatgcggccacggttcgagttgagccggttgaagccgtcggcatagcccaccggcacggtggcgatccagcggtcggtgggcgccgtccacgtgcgcccgtagctgaccgtctcgccggcccggatgcgcttgatgaagctcaccttcgagcgcatcgtcaccaccggacgcagcgcggcggtgcgcggggtctgcgcgtcgggataggccccgtagatcgcgatgccggggcgcaccatcgtcagcccggacaggtcgtggcccagcacgccggccgacgccgcggcgtgcaccaggggtaccgccggcaggccccgggttgcccgatcggcctggacgtcgtcgacggccttcgcgaagcgcgccagctcctcgacggtgaagtcgtaaccctgggtcgtgtccgacaccggcatatgggtgaagatgccctgcaggttgagggcgtcctcgtcgatgtggcgggccaacgccaccgcatgctcgggttcggcgccgatgcggcgcatgccggtgtcgagcgccaggtgcacgttcaccggcttgcccaccaccttggcggcctcggccgcctcgtcggcgctctgctcgtccaccacggtgagcgcaatgtccgcgtcgatggcggtgggcagttcctcggggaacgcatgggacagcttcaggatcggcagggtgacgccgccctcgcgcagcgccatcgcctccgagacggtggccacgcccaaccagtcagccaggtgctcgcgctggaacaggcgggcgatgggcaccgcgccgtggccgtagccatcggccttcacggccaccagcaccttgcggtcacccaccagctgcttgatggcccgggcgttgtggcgcagtgcatcaaggtcgatctcgagatgagtggtgtagagcatgggaatatcttgcaccgacggacgcgcggggacgccaccgctcacgaaaacgggcccgcgggacgcgtcgccccggtgcgtgctgacggccgatgacctcacgacgcgccgcaatctcccccggcgctgacgcgcggtaaccccttctacgcgctgatgcgcagttccccttctacgcgctgacgcgcagggccgccatcctggccaggatctggccggccagttcgcgcttggtcatcatcggcaggtcgtcgcggtggggctcgccgtcggtggcggtgaggatggtgaccacgttggtgtcggtgccgaaaccggcccccggcgtggtgagcgaattcgcgacgatcatgtcggcgcccttgcgggcaagcttctcggtggcgtaggccaccagctccgtggtctccatcgcaaagccacacagcacctggccgggatggcgatgctcaccacaccaggcgaggatgtcgggggtcgcctccagctgcagggtcagcgctcgacgcccgcgcttcttgatcttctggtcagcctgcgctgcaaccgcaaaatctgcgacggcagccgccatcaccaccaaatctgcctgttcgaagcgggcggtcacggcgtcgaacatctcggcggcggtctgcacctgcaccatcgtgacgccggccggctcgggcaacgacaccggccccgacaccagcgtcaccgccgcccccaggtcgtgcgcggcactggccagcgcatagcccatgcggccactggaatggttactcaggaagcgcaccggatcgatcggctcgcgggtgggcccggcggtgatcagcacgcgcacccccgacagcagcccctcggcgccaccggccggccctccggcgcgcagcggcggcatcgcaccggcatcggggaccaccacatcggaggtcaccgaatccgggacgacgagggtggtggagtgctcggcgtccgccatcgccgcatcgatcaccgcggcatcgatcggcccagcgtcagacgaacccgcatcagacggcgtcgcaccagccgattcgacatcagatgtgggccgcggggcctcggcacgggccgccccggaccgaccgggcccggcgacgtccgcatcgaaacgcggtgccgacatgccctcgagcgcctcgtcaacggcccactcgatgtcggacaactcggccagccgccccttgccgacgtcctcgcaggccagcaggcccgacgacggttcgacgaagctcatgcccagctggcggcaggtggtcatattgcgttgggtgaccggattgtcatacatccgcgtgttcatcgccggcgccagcacgacgggacaggtggcggccagcagggtggcggtcaggtggtcgttggccatgccggccgcgatgcgggcgatcacatcggcactggcgggggcgatcacgaacacatcggcccatttggcatcgtcaatgtgggtgattcccacatgcatgccgtcatcggtggcggtctggctggcccccgagtcgtcgaacatcgcgatgcgcaccgactggtgggtgagcgactggaaggtgagcggcgacacgaactgcgcggcggcagcggtcatcagcacgcgcacctgatggccctgtttcacccagtcagacgccaattgggcggccttgaaagcagcgatgctgcccgtcacccccagcaggatgtgacgctcacgcgaatgggtggatgaggcagatgtcatgccgatgttctcctggacattgggtgcgcaaccgtacttgtcgtcagtgtgccacgccggggacttcagccagatcggcctccagagccgacacgagccgcttcagcaggctgagcccggtctgggtctccgcccgacagatccggcgggtgccctccttcgtcatggagaccaatccgttgcgctcaagaatcttcagatggtgtgacacagcgggacgcgacagtgaggaactctcggccacctcattgacggtcagcgggccgtgctcgatgagtcgcacgagaatcgactgccgctcaggatccttcagggtctcaaacagcgggatgcactgattgaggatcagcaggctctcgagcgcacagtcgtcgtgcgatgcagtcatcgctacttccttcccgaattccgccgtggcgccagcgcgccaagaccatgactcctcaacgtactcatgagcgccaccgtggcgtccccactcgatgcgacctgcttaccctcggcaagtcggcacatctggtgttcgtaccaactgatcacgagaatggagcccagcgcacgatcaaccgccgagaccggagtggtcacgcgcggcaaggagacagtctcatgactgcccccatccagaatcttgttgggcaggtcgggactcaccaccagaccgcgaccgatgccgatcatgtcagcggccccactggccaggacttcctccatatcgggggccgccaggaatccaccggtcagagccacagggatgtcgaccctgccctgcaggcgccgggcgaaatcgaggaagaagatcgtgccacggcgagggtcgacaccgtccacaacgtcgaccggcggctttgtgtaggttccccccgaaatctccacgaggtcgagccccatggccgccatcgtctcgatcaccgacaaggcgtcctgttccgaaaaaccaccctccacaccatcggacgagttcagcttcagtccgatcgggaaatcatcacccagcgcatcgcgcatggcccggtagatctgcgtcaggaagcgcatccggttttccggctcttcacgaacgagggtgtagcgggttgagcgtgtcggtggccgggtaggggtcgaggtctccctgaggatggaagttctcacactcgccatctgccggaagacctcgacgtgtcacaccctactttcactacaccttgcctgaccacgttctacggtctcgacgagctcggcctggaggctgtcgggcagcgtctggacccggatcgggcggtgatcgagtgccgtgtcgtggagccggaccggtggtgccgcgagtgtggatgcgagggcgccccgcgcgacacggtgatccgtcggctcgcgcatgagccgttcgggcatcggcccacgaccctgctgatccgggtccggcgctacaaatgctgcgggtgtgggcgggtctggcggcaggacaccacggccgccgcgccggtacgggcgaagatctcccgcggtgggttggcgtgggggctggcgggcttggtcctcgatcatctctcggtcacgcgtgtcgcggcagggctgggggtgtcctggtccgccgcgaacgacgcgatcctcgccgagggccgccggcggctgatcgatgacccggcgcggttcgagggcgtgaccacgatcggcgtcgacgagcacgtgtggcgacacacccgccacggcgacacgtacgtgaccgtgatcatcgacctgaccccggtgcgcgagaagaccggcccggcacggctgctggacatggtcgccggacgctcgaaagccgtgttcaagacctggctcgccgccagaccgaagccctggcgagaggggatcgaggtcgtcgccatggacggattcaccgggttcaagaccgccgccgccgaagaactgcccgacgcggccccggtcatggatccgttccacgtgatccggctcgccggtgacgcgctggagaactgccgacgccgggtacagcacgacgtcttcggccggcggggcatgaagggcgatccgctctaccaggccagacggaccctgctcaccggtgccggtctgctcaccgacaagcagcaggcgcggctagatgccctgttcgccgaggacaggcacgtcgaggtcgaagcgacgtggggcatctaccaagacatgatcaccgcctaccgggacaaggaccgcggcctgggcagattcttcctcgcgcacacgatcgacaagatcagcgccagcgtcccggagcagctcgtcgagatccgcaaactcgcccgcaccctcacacagcgcgcttcggacgtgctcggctacttcgaccgccccggcaccagcaacggccccaccgaagcgatcaacggccgactcgaacacctccgcggcacggccctcggcttccgcaacctcagccactacatcgctcggtcgctgctcgaagccggcggattcagacccgcgctacaccctcgttcgtaaagagccacaaagctggccagtcaggccctggacgaggtgcgtcgccgagtccagcaagacaccctggggcgcaggggacacgccaaagaccccttgtatcgggctcggagactcctcctcaccggcgccaaccacctcaccgagaagatggcgaccaagctggatgccctcctccaagaaggcgacccgaactgggaggtgaccatcacttggaccgtctaccagaaactgatcgatgcctaccagcagagcgactcccatgacatggtcaccctcatcgatgctctcaaggacctgggggtacctcccgcttggagcgaagcacgcgggggagccgattcctgaggtcgccaggctggggcgcaccttgaaagcctggaagagggagatcctggcctattggcacaccgaccgctcgaacgcgggccccaccgaggcgatcaacaacgtcatcgagaccacccgacgcatcgcccgcggcttccgcaacttcgacaactaccgcctgcggatcctcgcctcagcctccggacaacgcccctaccgccaacccccgaaactcgtcaagcaaggacaaccaaaccacgctgaatgacgaagagccggatatcccctatccatgaaccaccgtgaacttgtcggagatccgacgatagtgctttctgggaactcctccaatttcagaaacaccgtctcgcaaaaaaactccagcgaaacgatatgcacgaactctggtgacgggatcgacggcctgaatgaatactactcgcttctgtccagtagccgaatctattgcattccaatcctcattgtattcatccagactcagcccgtcatccgagagcatattgttccagccacgactgaccgcatgccccgcaactgctttcttgggaaaccagaccaaatactcgctgccatagatcgaccggagagaactgggaacaaagcaagacttgcgaggacctctactctccagagagtatgaagacccaagaatcgagttgcataccgtggcaatattggcgaatccgatgtcatcggccatggaaatctcatcacggttctggaagtatgcaaatggatcgtccggttcaatcacccaaggcgagaagccgccactttgccggagggtctcgattcgtgcgcgcagctttccaaccacgtcatcgatggcattgtcaaccgcttcaagcggagcccattgaacgttcccagtgtgatccctgacaaacacgtcgatgtcaagttgttgatacccactgttcggttgaacttgatgcagcacatcgaatatggtaatcgttctgcccgcgtcttgctctgagcgagttgcgtgatacggttcgttgcattcgatgcccatattgagctgtggaaagtacaagtcaatgaagtatcgcgaccgaggatcgatcgcaaccagcttctgggagaccggctggacttcagagtcgtcgaggcggttccaaaccgcgttcacgacgtagttctcatagtctttgcgactcgttcgcgagagtgtccgcgccaagtactccagtttttccacggctattctcctctagacagtctgggccaacgcccgttggcggcggtcttgcatgatcaagcagaaccacgtcagcgggcttccttctggccacgagatccattgcagcgcccgaactcaatgctcatccagtctaccctcctgatgcccagttgtacggcggttgacagtggacagatcttctgagcacaaaaggctgcccagcagggaactgcacgcatatgcttcgagcatgtctaccgacttgggcgggctcctaaccgccgttcaacaggatctcggcgactcagcgaactggcagtgtcctgtcgagttccacgactcgttggccctgtgcgcgctcaactccgcatactcccttcgcgctacctcagcctcagtcaagaaagtgatctcgctataccgggagtctcgtgcgacagcggataccgacagtggacccgatctcctccagttcatgcaggaagcgggcgggcccgaggacttcgctcgcgatgttctgcaaaacctgagcaaactgcccggcacgagtcgacttcgaaccgttgggatacatgaagcactgacaaaccggctcttcgtcattcagcgtggtttggtgaggctggcctgagtgtcgtggggtggtgagaggggtgtgtcggtgctggtgagaagggtcggggccttcttgaatgggaagcgttcagactcacccgttcgaagaagaccccgaccgtgttccacactacctgcactcatcccggctactgcacgctcgctgatgccatcgctgacctccccggcttccacgtcacgcgtgtggaccgctcacctgcgggcctgcgtctgaacgtcgagaccgaccctgggggagtgctctgccccgcctgtggggtccaggctgtggcggatggtcgccaacaacgtctcctccacgacatcggtgtcttcggtgtccctgtcctcctcgtgtggtccaggcgcacctggcggtgcaggcaacactcctgcccccaggtctcgtggggggaagagacgcagttggctccacccctgccaagcacttcacgacccgagccatcacctgggctgtgaaccagcttctcacccgagacgttgtcatctccgccctggcccgggacctccaggtggggtggcgcaccttgtggaaggcaatcgagggacccctccaggagcgcctcaaggagatcagcgaccaggccagcgtggaagccctgggcctcgacgagcacgtgtggcgtcattgcgggccccacaagaatcggatgatcaccggcgccgtggaccacaccagaccgaagagaggcaaggacgggaagacgaagccgttcgcgaggctcctggatgtccaggtcgggcgctcgggagcggtcgctgaggactggttggcctcccaaggcaaggagttcgcgagcaagatccgcatcgctgccatcgacccctacaggggctacgccaacgccatctcagcgaccctgaaagaggcggacatggtcgtcgacatcttccacgtgacaaagctggccagtcaggccctggacgaggtgcgtcgccgagtccagcaagacaccctggggcgcaggggacacgccaaagaccccttgtatcgggctcggagactcctcctcaccggcgccaaccacctcaccgagaagatggcgaccaagctggatgccctcctccaagaaggcgacccgaactgggaggtgaccatcacttggaccgtctaccagaaactgatcgatgcctaccagcagagcgactcccatgacatggtcaccctcatcgatgctctcaaggacctgggggtacctcccgcttggagcgaagcacgcgggggagccgattcctgaggtcgccaggctggggcgcaccttgaaagcctggaagagggagatcctggcctattggcacaccgaccgctcgaacgcgggccccaccgaggcgatcaacaacgtcatcgagaccacccgacgcatcgcccgcggcttccgcaacttcgacaactaccgcctgcggatcctcgcctcagcctccggacaacgcccctaccgccaacccccgaaactcgtcaagcaaggacaaccaaaccacgctgaattggggttacccgcaagtttcggacggttggattggttcaggcggcccgtgtcagggctgccgcgtgttgggcttcgaactcgactggggtctggtagccgatcgctgagttgaggcgcttcgtgttgtagaagtcgtagatccactcctccacgccctgaatggcctgctggggggtgtcccactcgtagcggtcgtagaactcagccttcaacacggaccactgggattcgatcatcgcattgtcccagcacaccccggtgcgtcccattgactggtcgaggtggagttcccggcagcactcatacatctgctcggaggtgaattgggcaggttcaaccggtcgtcgcaacaccggcttcttccaaggatcgtagttgctcttcgaagacctcggccggtgttctccagccgagggtcttgcgggggcggttgtttagggtgtgggccacggcttccagatcttctgctgtccagcgggacaggtcggtgcccttggggaagtactgacgcagcagcccgttggtgttctcgttgctgggccgctgccatgggctgtgggggtcagcgaagtagaccttcgtgccggtctccagggcgaaggtggcgtgagcggatagttccttgccgcggtcccaggtgatggtcttgcgcagctgctgcggcagagcggtgatcgacgcggcgagcgcggtgttcatcgcgaccgcaccgtaaccgcccagcgaggggccgttcttgaccggcggcgtctggccccagccctccaagcgaggcagatggaccaggatcgtggcgcggctgtggcgttcgaccaaggtgccgatcgcggagcggccggtgccgatgatcaggtcgccttcccagtggccgggaacagcccgatccgcggcctccgcgggccgttcgctgatcacgacatcggcggtgacatggccatggggcttgttccgcgaacgctcacgcggcgagcgcagagccctgccggtgcgcaggcaggtcaccaggtcccgcttcagcgccccgcggccctcgatgaacagtgactggtagatcgcctcgtgactgatccgcatggactcatcatcaccgaactcgatgcgcaggcggcggctgatctgctccgggctccaggccttcgaccagcgacggtcggcccggtggggcttgttcaaccctttccagactggcgtgtctgggccgttgacggtgcggccgtcagggtgggtgaccttgccggtgagccggtcctggacgtagtcacgcagccgcgggttggtcaccatcttcgcttctttgggcctcttggcggcctcgtgggctttccactgggcgaccatggctcggtattcgagtttcccgcctcgggtagcggcgttgcggcgcagctcacgactgatcgtgcccggatcacggcccagagcccgggcgatggtgcgaacccccttgccctgggccttcaggatggcgatctcctcacgctcggcgaagctgagatatcgcccactgggttcgaccagactgatcggtggcatgccgccagcgtggcggaaccaccgcgaggccaccgggatcgacacacccaccacgagcgcggcctccgccgttgagatccccgtcgcaatgagacgccagaagtcacgctgcaccgtccgagacggttgcggcctgcccggagagaacatcgccggccgcaaggccctgtccgctcgccactgacgccgcaacccctcggggacatcgccagtcctcatgctccaatgcttggtagccatcctccacacctctcacatcaaggtgttgcgacgaccagttgaatgcgccttgcgtgccacggtcggaatggatgatcactttcctgggcgcgttcgggcgaagaatgcgagcccggcgcaacgcctcctccacgaggtccgtcgtcatggtcgtcgacatggcggttgcgatgaccttccgggagcaagcgtccttgatggcgcacaggtacacccacccggcccgcgtcctcaggtaggtgatgtcggtgacccacacgcgatccacctgccccgtgtcccagtgtcgcttgacccggccagggatcgaatgcgtgcgcgtccccggtatcgtcgtcaccggacggaaccggcgcggactgatgcccgcaaggccctgacggcgcatcgaggccgccaccgtcttacgatccaccaccaccccctcacggcgaagctgggcgcacacacgcaggtacccgtacgtgcttcgggagtccacccatatgcggcgcaccgcctcatccaggcgccgacgcgcccggaggctggggagaagatgatccccatcccgctgctgggccgcaacccacgcgtagtacccggaagtggacactttcaacaggcgggccatccgggcaatcgggtaccgagccttctccgcctgcatcaacgtgtacttctcactcactgatgcttcgcagcgaagaaggccgctgcttttcccaagaactcgttgtccatccgcaggtccgcgttctccttgcggagccgcttcaactcctcgcgttcatccggactcaacgtgctcggcgtcatggtctccttctctgccttcacccacctgcccaacagttggggacccagccccagctcctgggcgacctcggcgatcgtgcgacccgagtcgatcaccatcctcgccgcctcatggcggtactgggccgtgaacttgcgacgctgcctccgcgtcttctcgttccccgtgctcatgacaacaccttcccccagggccaccaggccccgccacatcaggtgtccgaaaaaccagggtaggcccactgcacggctggcggcaccatggcggtgaagcgcggcaccacctattgcaccttcggcacgcaggtgcagacagcacttgctgccgacgccacgcgcacgtcgctcaccctcaccaacagccagaccagacggtcagtggccgtcacctgcgccaagggcaccacgatcaccacatgcaccggggacgacggttcggtggtctggctgcgcggctgacccggcgcgctcggaggccgtgcgcctggatgcgtacgaccggaccacggcgcacgtcggggcatggtgccacactggagacatgcttgcccatgtgttcggtctggaggccgattggcccggccaggatctcgtgggcttcaccgacaccatcgacaccgagttgacgctggcagcctatgcgtcgggcctgttcccgatgccgctgcatgagtccgattttcatggcatgggctggtggtcgcccgtacgtcgcgccatccttccgctgggggcgctgcgggtgagtcattcgctgcggcaggcgctcaaccattaccgaacctcggtcgacaccgccttcgagcaggtgctggccggctgcgccgacccaaagcgtcccgacggctggatcgaccaggatgtggtcgccgtgtacacgcaattgttcgaacgcggcgtggcgcattcggtggaaacctgggatgacgaaggacgtctggtgggcggcctgtatggcgtgggtatgcgtggcctgttcgccggtgaatcgatgttccacgaccccgaacatggccgggatgcgtcgaaggtggcgctggtgcgtctggtcgacaccttgcgggcgcgcccagatggggtggcgctgtcggctgatgtctgggtgttcccccggccacccccgtacgtgcccgctgcccgcacccgtctgatcccctcaactctcaccgtctggcagaggaaacaatcatgccgagcaagaaccagccgaccactgagcaggtcgcaaaaaccaaacggagggccgaaaccgtatcggcctacgcatccaagggctgggtgcaggccgtcgctttcgtcatgttgctgggtttcggcatcatggcagcgcttgcgatgcgcacctacaccgactcgatgccccagcccgatcgcatcgtcaatgagcagggccaggagatcatctccaccgagcagatcagccacggtcaggcgctctaccagagccgcggcctgcaggaatacggctcggtgatgggccacggtgcctatctgggccccgacttcaccgccgaatatctgcgcctgaccaccgacgctgccgtcgagaagtacaccgccgatggtgtgcaggatcctcgtcaggccgtcgaggacgagtggcgcaccaaccgttacgacgagaacaccggcaccttggtgtggacagaccagcagatcgccggttatcaccagatggtcgactactacaccgacttcctgggttcgccgaccaccgagcatggcatgttccccaatgcactcgagcccggtgaagaaatcgaggacaccaccgccttcttcggttggacggcgtgggcatcgtccacgaaccggcccggtcacgactactcgtactcgaacaattggccctccgagccgaatgtgggcaacggcccaaccgccaatctgatgatctggtcggtgctgtcgctcatcgtgttgctgggtggcatcggcattctgttcgccgtctatggtcgctggtcggcacgcatcggctggcatggtgaagaagccccggtgcttgatttccgccagcccgacgaggtgcatctgacgcccagccagaaggtttcgggcctgttcttcgtggtgatcatggtgttgttcttcgcccaggcgatggtgggcgcgctcaccgagcactaccgggtcgagctcaccggcttcttcggtatcgacatcgcccagatcctgccctacacggtctcgcgcacctggcatgtgcagctgtcactgctgtggactgccgccgggttcctggcggccggcatcttcctggcaccgctgatcacccgcaaggaacccaagaagcagggcttcctcaccggcgtgctgctggtggccgtggccatcgtggtgttcggctcgctggccaccgaatggttgagccagaagggcatcctgcccgagggttcactgttctctcagcagtgggagtatctggatttgcccaggctgttccagatcgcattgaccgtgggcatgttcttgtggatgttcatcgtgatccgcacgctgcgctccaagctcaacagcaccaagaagacgtcgctgccgtggctgttcatgttctccggtctggccatcccgatgttctatgcggtgggcatgctggccggttccgagacccacttctcggtggccgagttctggcgcttctgggttgttcacctgtgggttgaggacttcctggagctgttcaccaccgtgatggttgcctatgtgttcgtgctgctgggtgtggtgcgtcagaagatggcgatttcgatcatcatgctcgacgtcatcctgtattcgctgggtggcgtggtgggcaccatgcaccacctgtatttctcgggcaccagcgccgagacgatggctttcggtgccgtgttctcggctgccgaggtgatcccgttgacgttcttgacggtggaagcctggggcttcatgcagttgggttcgcgtcaatacaccaaccgcaccaagccgttcccgcatcgttgggccgtgatgttcctcatctccgtgggtttctggaacttcctgggtgccggcattttcggcttcctgatcaacctgccgatcgtgtcgtactacgagatcggcacggccttgaccgccaaccatgcgcatggctcgatgatgggcgtctacggcatgttggcgttggcgttcgcggtgttcgtgttgcgctacatcattcccgagaaggaatggcccgagaagggcgtcaaatgggcgttctgggcaaccaacatcggcttggtgtggatggtgttcatctcgctgctgccgttgggtgtcgcccagctgtaccagagcgtcggcaagggttattacgatgcccgtgccatcggctacatcaccgatccgggcaatactctgctcgactggttgcgcatgcccggtgacgtgatcttcctgtcgggcatcgtgccgctgctgtggctggcgtggaaggcgctgaagtcgtacttcagcaaggattccaagccggttgtctacgaattgatggatccgccgctgtacgaggcgctgaccgatgagcgcatcgccgagatggctgccgccaacaaggccgatgcggttcccgatcaggtgagcccctaccgcagcgatcgcagagaggaataacaccatggatgcgccgttgtggggtgttgatttcgtggtgtggatgttctgcgcctatgcgctgatcctggttggtgtgggctatgggcttgacctgttggccaagcgcacctcgcagcagtcgtcggcgaagcggaatttcggtttccactaccacgagaatcaggacgcctggttgtgctccgaggaccagtggcttttccccactgccttcgaccgtgacaaccgggtgatgcactaccgcgcgtcgtccatcgtgtgcaacacctgccaggtgaagaacacctgcaccacctcgatgatgggccgcgagatcactcgcgaggttgatccgtggccctattcggagtcgggacgtttccaccggggcattgccctggcggtggcggtttcggggttggtgttgatcgcgggggtggccattttgggtcacaccgcggcagacattgcggtcgaggtggccactgccgttgcggtggtggctgcctcggttccgctggcccgtcatctgatgcgcagcccggcgaatttcgtcgagcccacgcatgtgaaggtggtggacgccgacgagatcgatgctgctgtgctggccgatcggttcgcccagaagtggggcaatgtgagcgacgaacgcaagcgcgccgcagccctggaacgcgaacgcgtactggccgatgcagccccggccaccggttggcgtggacgcggcacccgcgacaccccgctgcacatcagctcggcgttggcgatgaaggaacgcctcaagcgcgaaagtcggggcgccgaggtgatccatgatggttcggcgccgattccgggaggcccgcgtccacgtgacatcggtgccggtcgtgaagagacgccggactcgtgaccatctgctcgtgggtcggccacccgtgatgggccgatccttggggtcgaatcctgatcaatcatgagttctgcggccgggaccccggccatgccaaaccgtcactacttttttcgttctgaaaggcccgcgtcgtggctctgctgattgttgttcttgctgttgttgccgtcgtgctcattgtgctgctcgtgtcgttgcgggtgattcccgaatatcagcgcggcattgcgttccggttcgggcatctgcgtcccacgttggagccgggcatccacttcgtgttcccgctggtcgattcgttgcagcgggttgatctgcgggtgatcacgttgacgattccgccgcaggaagtgatcaccaaggacaatgtgccggcgcgggtgaatgcggtggtgctgttcaaggtgcttgagccgaaggatgcgattctcaaggtggagaattacgcgattgccacctcgcagatctcgcagaccacattgcgttccctgctgggacgggtcgatctggataccctgctggcccaccgcgacgatctcaacatcgatttgcagggtgtgatcgatgcccgcaccaagccgtggggcatcgaggtgtccaccgtggagatcaaggatgtggagattcccgaggcgatgcagcgggcgatggcgcgtgaggcggaggccgagcgtgagcgtcgcgccaaggtgatttcggcgcgtggcgagttggaggcctccgatgagctgcgtcaggccgccgagaccctgagccagtcgcccgcgtcgttgcagttgcgctacctgcagacgctgctcgagctgggtgccgaccagaactccaccgtggtgtttccgctgccgctcgacatcatcggcccgctgctcaacaagatgggcaacgccctcaaatagagcatgtgggcggtcagattttcgaccgtgcactgaacagcccgtcctggttcaccggggcgggctgctttcagttgtccatgccgatgggctcggcctcgtaggctttggatatgccagagtcattgacgcaggccgagcccattgccctgtcgcaggcggtgtcgccgctggtgttggcgatggacatcggctccacctcgagccgggctgcggtccatgacgcgctggcacgcccggtggtggggcatcagaccgaggcgaagcatcgttttcatgaggcctccgatggcacatccgagatcgatgccgatgcgatggttgccgagatttccgggctcatcggcgagacggtccagggcttgccggcatccagcatcgcggcggtggcgatggacacgttcgccagctcgctggtgtgtgtcgacgatcatggtggcgttgacgatcctcgacccccgcagccgtccgttggtcccaggggtggcgccgatgacatcggaggagtatcagcgggcgttgaccggggttcatgacgtggtggcctctgcagtcgcactcccgcccgccgatgcaggagaagcactcgccagcatggacatggggatccgtgccgtcaccctgagtagcggggagctggggttctggtcgcgtcgcgatgaagttggcagggcggtggttcgcggagacctcgacaccgtgcgctactccgcgttcttggaagcccttggtgagcacgttgtctggcccaaggcggacatgcagcgaaacagcgtcgagggttgagagacgtcgagtgaccctcacgcctcccagagatggacctggtagtccatcagccgtgcggcgcgaagacgccgacccatcgagggatgtaccgcgatctccttggtgaccatcgaggcaggctttccgtatccgggaaaggagagcgttccagacttcggcaccggttgccagctgtcccccggttgaacgatcagtcgcggatcggatcgacgtgcgccccagaggtaaagagtctttttcaatagctggtccaggaacgtacacatcgaccctcgcaagccctccagcaccgtctgcggcgtggacaccaggaacatggaactcatcgtgcctgcttttccggcgtcgatcatggcacgtgtgcccacccagtccggctgactgggcaagggattgatcacacccgtcggacgcgccctggtgcccaccatctggatcaatgacattcgcggtgcacggtgcaccatcgtgttgcgctgagcgatcagccaggaaagccagtcctcagggccatgatcctcgggtttcaggacatctgagagcagagcattctgtcgctcacgccccgatgtgccgacatcagccagcacaccctgtcgcaacccttggccacgaccgttcttcagcgccttgacggccaccttctgaagttcgccccaatcggtgcgaatgacgtcgcacttgatcccggcgacaatgacgatcaccgcggcaacccggtcgagggcctgtccaaggctgacgatggtctgctctagccatgcgtcgagtcgatcctcacgccgctgtccggcatctccgagagcctgctgagcgccgatcagttcgtcgcgggatcccccacgcttggcaatggcgcgccaggcctgcgtcaacgcatggtcgcgggcacatgagctttctctatactcctggatggccagcgaggctttgatcaaggcttccgacacaccgccgcaagcagacagtagatactcccccagttccgctgagacttgccagcccacgtatcctcgccaccagccaatcccgccctgattgtcgtcaaggtcggccaagatctcatccatgagacgagccaccgaggatgtgaccggctcgactgcgctgcggtaggacgtcatagccccagcgtagaaggacatcgccgtgatgcccggcgttgtcgtcgcggtcctgtgggcactcattgccctgatcctgttcctggtcgggcgcagccagatcaagcaagtgaagggcgtcccgcagaccgtggacaccctgaaagagatccccgaaacgctgaagagaaatgaggagaaccgatgagcgattcacccgacgagatccgcgccgacatcgagcggacccgccacgacctcggcagggacgtggacgccctggccgatgaggtctccccgtcgaagatcgtggaccgacaggtcgacaaggtccgtggcgccttcacctccgtccgggagcgtgtgatgggcgcagcggatgacgccggctcgtcgctgacggatgcgggctctcacgccggagatctgaaggaccgcgcggtcgccaaagcagaagggaacccgctggcggtcggactgatcgcgttcggtgccggcctgctcgcggcgtcgctgatccccgcgtcatcgaaggagaaggacctcgctgcaaccgtgaaggagcaggcgcagccgctggttgacgaggtcaccgatgctgcgaaagaaatcggcgagcatctgaaggagcctctgcaggcgtcggtcgaatccgtgaagtcgtcggcacaggactccgtcgccacagtcaaggacgaagcccagggcgcggccagcgacgtgaaagaccaggctcagcacgctcgcgataacatctccgacagctgaacccgcacgaatcgggcgggcccgtcacacgacgggcccgccccttcacgaaggagcctgcaatgaccagcacagccccctccaccccgcgcaacgccccagaccccgaagcatcaggcaagcccgattccccagacgatctgcacaagaggtcctggaaatacgtactgcggaagacgattcgcgagttttcctcggaccagtgcaccgacatcgccgcctccctgacgtattacgcggtgctgtcgctcttcccgtgcctgattgcaatcttctcgctactgggtgtcgtcgggcagggaaaagccgccagcgacgcggtgctgggaatcatcgagcaggtcgctcccggcgacacggtcgacacaatccgcggaccgatcgagcagatcgccgagtccccgggtgccgggttcgccctcatcaccggcatcctgctggccatctggtcagcatccggatacgtgggagcgttcagccgtgcgatgaaccggatctacgagatcgaggaggggcggccgttctggaagctgaagcccgcccagctgctggtcaccgtcatcaccatcgtgctgctcgtcatcgccgcgatcattcttgtcgtctccggcgacgtcaccaaagcgatcggcgacgccctcggcattggcgacgtaccccagacgatctggtccatcgccaagtggccgttgctcatattcatcgcggtgttggtcgtcgccatcctctactacgccaccccaaacgcgaagcagccaaaattccggtggatcagcatgggcgccctgctagcaatcatcgtgctcgcactcgccaccgcagccttcgggttctacgtcggaaacttctccaactacgaccgcacctacggctcgctcgcgggcgtcatcatcttcctgctctggctgtggatcgcgaacctcgcgctgctgttcggcgcggagttcgatgctgagctcgagcgaggtcgccagctgcaggcgggcatcgccgccgaggaggacatccagctaccttcgcgcgacacccgcaagagcgacaaggccgccgagaaggagcggcaggacatcgagaagggccgagagatccgacagaatgccgaccccgacgacacagccaaggacgcgaccacccccggtcctgccagagaacactgacggacggcctcgctcggggcgctcacgccgcacgcgattcttccccgtgtccgtcttcgacctcgcccagactgaccctatcgaaggagccgagccgatccccgaaaaccccgctgacgcccaccagctcagcggcgacgaccccgctggcatcgccgaggccgtgaccgactggctcaccggccagggctgggccatcgaacacaaccagctcggggccggactcaacggctacaccagccccgacgacaagcgaatcgtgatcgggctcttctcagatgagggtgtaggtgtggtctgaatccgccggcttcgaggagtgcgcgggcgatgtagttggtgaggttgcggaagccgagggccaggccacgcaggtgctcgaggcgaccgttcacggcttcggtaggtccgttgctcgtgcgcggccggtcgaagtaggccaggacgtcgcaggcgcgtctggttagggtgcggccgagcttgcgcagttctaccaacgcctcaggcacaccctcggcgagggcgtcgatcacggagctcatctcgacgcggccggctgcccggtcggggtgacggtaggcggagatcatgcgctggtagatcccccaggtgcactcgacgtgcacgtgccggtccccagcgaagagcttgtcaaggcgctcgtgctggcggtcggtgagcaggtcagccccggtgtgcagggtccgccgcgcggtgtagagcgggtcgcccttgcgtccgcggtgtccgtgcagttcctgctggactcggcggcggcactcatcgagagcgtccccggccaaccggatgacgtggaagggatccataaccgtgacggcgtccggcagctcctcggtggtggcggtcttgaagcccgcgaacccatccatggccacgacctcgatcccatcgcgccaagcctggtcccgctcggccagccagtccttgaacgccttcttcgaccgaccttcgaccacgtccagcaggcgtgagggcccggtgccgtcccggaccggggtgaggtcgatgatcacggtgacgtacttgtcaccgcgccgggtgtgccgccacacgtgctcatcgaccccgacgaccttgacaccgtccaggcgggtcgggtcctcgatgagcagacgccggccctcagccaggaccgcgtcgttggcggtgttccacgccacgcccagtccttcggcaactcgggccatcgacaggtggccgacgacgatcccgaccagaccccaccgcaggccggcgcgggagatcttggcccgcggcggcgccgcagcggtggtgtcctgacgccacacgtgcgagcactccttgcagcggtagcggcgcacggtgagcaccagcgtggtagggcgccacccgaacggctcgtgcgccaactccctgctcaccgtgtcacggggcacgccctggcagccgcaccgcctgcaccagtagtccggctccacgacccggcacgccagcacggaccggtcaggctcgagcagctggccggtgacctccagaccgaggccgtcgaggcgggtgaaggtagtcaggtcagggcgcgtgaaggtagcgtcaggcacgtcgaggtcttccggacgggttgtgtgagaactcccatcatcggaagacctcgaccctcaccccgacaccgacgcgccgccccaggtcgcaccacagctacaccctcatctgtgaagagccggttttccagtgaacccccgtactcgtccgtccggtggttgtcgagtggtgacaggaactggttcaccaggtacccgtgagctccgtgaatctccactccggtgaatccggcgtccctcgcgatgactgcggtgcgtgcgaaccgaccgacaatcgcttcaatttcgccacgggacagctcgcggggcatggagaagaagcgttcgtacttgccaccgaatccgatggcactgggagctaccggatgctggttgatggtgcggggcgactgcttgccgggatggttgatctgcatccacagggccgcaccattctcggtaccggcctgcgcccactggcgcagcatgtccatatccgtctcgtcctcgacggcgacattgccgggctcgcccaattgccgcggatcgaccatcacatttccagtgagcaacagcccggtgccgccgctcgcccaatgccgatagaggttcacgagcggctcggttgggtgcgcaccgcgatcgcccagggcctcgttcatggcgcccttgaggatgcgattcttgatcacggcacccgagggcagcgtcaggggatcagccagggtggcctgcctggtcgccaggatgtcggcggatgcatggttcgagctcatggctcaccttctcggagtagatgtttgtgcgtagaaacgtttataccctttgacatatggcacgctagcacgacccacatgatgaggaaagagcccagttaccaaggcagtgacgccaacgcccgcggggtaccgcgggtagtacggatgtcgcccaggcgagacctcggcgcggtacgaatcggcggcgtttggacggcccactcgcgaaccgccacagcccggaacgatgatccagtagggccagaactcgtcgagggtgacgctcgggcggtacccgtcttcagtggaacagcggcacgcccgcggcctcggcggcctcccgatagtcacggcccagcgactccacggtttcgtgggcgttcagcccgctggggttgggcagcgcaaagacgtgggcgctgctcccggtgccgtcgccccaatcaaggcgcagcgcctgttcaccgaccttggcatgccggtccccggtggccacccggtaggcaccgatgcccaggaaggccaccaccttcgggtgatagcgacgcaccatctcacggatgcgcgccagcccgtcaacgaactgctggttgtccagctcatcggccttcgtcgtggcctcgcgcgccaggttcgagatgccgacaccgccacgctccagctccgacagcccctcgggcgggtacccgtgggaggcgtcgatcacgtgtgaggtgatgccggccgcagccagcgccggatagaagcggttgcccggatgggcgaagtggacgcccaccccggcactccacaggctcgggttgatgcccacgaacagcaggcgcaacggctccggcaacaggtcgggcaccgtctggtgacgaaaggcctgcagctcggcgcgggtgaatcccttcgccatggctcagccccgctcccccaacgtcgcgaccatcacggccttgatggtgtgcatccggttctcggcctcgtcgaagatcacgtcggcgttcgcctcgaagacgtcgtcggtgatctccagggcgtccatgccggtgagctcgtagatctcgcggccgatcgcggtgcccaggttgtggtaggcgggcaggcagtgcagcacctggaccttcggattgccggtgcgagccagcagggcggagttcacctgatagggcctgagcaggtcgatgcgctcggcccaggcctccttcggctcgcccatcgacacccacacgtcggtggagacgaagtcgacgccctccaccgcattcggatcgtcggtgacggtgagccgcgcgccggtcgtcgcggcgatctcgttggcggtggcgatcacctcggcactgttctgcagctccttgggcgcgatgatgcgcatgtccatgccggacagcgcgcccgacaccaggtgcgaattgccctcgttgaagcgcgcatcgcccacgtaggccaccgacacctcgcgcagcggcttggtggaccgttcggtcatggtgagctggtcggccagcatctgggtgggatgccattcatcggtgagcccgttccacaccggcaccccggcgtagtcggccagcgtctgcacgcggctctggccgaagccgcggtattcgatgccgtcgaacatgcgtcccagtacgcgggcggtgtcctccaccgactccttgtgccccagctgcgaacccgacgggtcgaggtaggtcacgtgggcaccctggtcgtgggcgcccacctcgaaggaacagcgcgtgcgcgtggacgtcttctcaaagatcagggcgatgttcttgcccaccatcgtgggacgctcggtgcccgacttcttcgccgccttcagctcggcggccaggcgcaggaactcggcccactgctccggggtgaaatcggcttccttcaggaagttgcgacccgacagatctaccgccatgtgatcctccgttgacgaactggtctccagactatcgggcaccacccccacgcccggcgatcgcccgggggtcgattgggggacgccgcgggtgccgcagccttgattgccgggcgcccggcacggcaggctgggggcatgctctggcgcacagtggtgaatgcggcggcggtgggcgttgccacctggctgctgcccggaatcagcttcatcggcaacgacaccacggggcagcgcgccctgaccctggcgatcgtggccattgtgatcggcctgctgaacgccttcgtcaagccggtgttgacccttgtcagcagctgtttcgtggtgatcacgctggggctcttcctgtgggtgatcaatgcggcggtgctgatgttcgccagctggctgtgcggtgccatgggcgtcggctggcatgtggccggctggggctcggccttcgtcggcgcgctcatcgtgtcggtggtggcgatgctgctcggcggcaaccgcgacaactacgggggccggaattgagcgcgttcgacctgctgttcgtctgcctgggcaatatctgtcgctccacgatggccgagcaggtggcccgcgcacaggccgctgaccgggcgctggggctgcgcatcgattccgccggcgtgagcgattgggagcgcggcaatcccctcgacccgcgtgctgcgaaatgcctgagcgcccacggctatccggtgggcgatcaccgggcccacctggtgaccgatgccgagctcggctccggcctgatcatcggcatggagcgctcgcacctggacgacctggcgtcgatgggcgcccccggcgaccggctggcgctgatcaccgacttcgtgcccggcgaccacgccgacggcctgcccgatccctggtacggcgatatgtccgacttcgagttcacgctgaaggtgatcgaggcggcgatgcccgccatcctggatgacgccgcctcgctgcgtcgataagtgggatccgcgggtgagggaggccttcgggggcggcgctgagtaggctgacgccatgactctcttcctggtgggtggcggcccgtctcaggcgacggggccgatttatgacagcttcgtcgagcaggcccgtggccgcggaccccgcattgcgctggcaatcctgggcgcgcccgagcaggccggcgcatcagtggggatgtacgccgacccgatcaggcagcgctggcccgaggcacagatcgaaccgatctggctgatcgacgaggacgagggcaccgtcgagtggcccaccgatcccgagcagctcggcggcctggtggttgccggcggctgggcaccgggttacctggacgcgctgacgccgcttcgcgacgagatcgtgcgcatcgtgcgtggcggcgtgccctatatgggcttcagtgccggcgcccagatcgtggccaagcacgcgatcgtgggtggctggcagtcgcacggacgcgcagtgggccccgagatcgccggcgacggcagcaccgagatcgtggtgcgcgacgggctgggcctgatcggcagtgccgtggacgtgcacatcgactcgcaacacctgctggaacgcgccatctccgcgctgctcgaccatgacatctccagcgccatcgcgatcgacgaggacaccgcgctggtggtcgacgtcgcctcgggacgctccgacgtggtcggatcgggcgcggtgcactggctcaacaacgagggccacgaggtgcgcgtgcgtcgcacccagggtccgcaggcgcagccggtcgttgaggacgacactgaatccacatcggacgctgggtccacaggcgacactgcctcccctgaagacactgcgtcctctgatagcgctgcgtccaccggcgcggacgtgtccgccgacacggcaagccccggaacagaatccgaaccgccgacgaacgagaaatgagacagcatggcgatgcagatcctggttgttgacgatgatcaggcggtgcgcgattcgctggcgcgttcactgcactacagcggctacgaggtggagaccgccgaggacgggctcgaggcgctcgcgaagctgtcgaacctgcaccccgacgccgtggtgatggacgtgatgatgccgcgcctggatggcttggagaccaccaagatgctgcgcgccaacggcaatgacgtgcccatcctggtgttgacggcccgcgacgcggtgggagatcgcgtcgatggcctggacgccggggccgacgactacatggtcaagccgttcagcctcgaggagctgctcgcccggctgcgggcgctcacccgccgctcgcgtcccgagtcgcagcaggccaatgaggtgctcagcttcgccgacatgacgctcgacccgcagacccgcgaggtcacccggggcggacgccggatcagcctgacgcgcaccgagttcgcgctgctgcagaccttcatggagcatcccggcaaggtgctcgaccgcagctggctgctcaatgaggtgtggggcttcgatttcccggccaccgccaattcgctggaggtctacatcggctacctgcgtcgcaagaccgagcaggagggtgagcccaggttgatccacaccgtgcgcggtgtgggctatgtattgcgtgaaactgcaccgtgatccggcccctgcggcgggcagtgctgggcaggaacggcgaaccccgcaccctgcaacagcgctttgcggccatgaccgcggcggtggtggcgttggccgtggccgttgtgggcatgatcgcctatgtgtccacaagccgctcgttgtacggccaggtcgacgatgagctggtgagcctcgcgggctacatggtcacccccatcgcgtcggacgtcaccggcatgggcgggctgaacagctcgtcgttgcaggccgcgaatgtgaacatcgtgctggtgaagtccgaccgttccatcgtgcgcgtgcagggcgagaaggtgagcatccagcccgacgcccccgaggtggcggtggcgcgtatgaagttcggcaagtcgacgcgcaccgtgtccctgggccccgacggtcagcgctatcggctcgtcgccgtgccgatggaggccaaggacaacagttcctatgcgctggtgttggcgcgtcccctcgaaccgctggtcgacaccctcgaccagttgcgcgccatcctgttgtggctgggcatcggcttcacgatcatcgccgcggcggtgggctacacgatcggacgccgggtgatgcagccactgcggcagctgtcggacgcggtggcgcacgtgaccgagaccgacgaactggtgccgatcggttccacgcgcgccgacgaactgggcgacctgtcacgggccttcgacacgatgatgcattcgctggcgtccagccggaaccgccagaaatacctgattgccgacgccagccacgagctgcgcacacccctgacgtcgatgcgcacgaacgtcgagctgctggtggccgacgagaagagcggcatgctgcccgagggtgcgcgtgccgagatcctgggcgacgtggccgcccagctgggtgagttcacctcgctggtgggcgacctggtgcagctgagccgcgacgacgtggtgctgcccagccccgagccgctggacttcgccgaggtggtggagtcggcgatcacccgcgccaagcgacgcggcagcagcctcaacttcgatgtctcgctggagccgttctacgtggtgggcgagcccgacaccctggaacgcgccgtgacgaacctgctcgacaatgcggtgaagttctcgccgcgcggcggcacggtgcatgtgcacctggccggcgacacgctcaccgtgtccgacgagggtcccggcatcgcccaggacgacctgccgcacatcttcgaccgcttctaccgctcgaacaaggcccgcaacacccccggcaccggactgggcctgtccatcgtggcgcacacggtgaaggcgcacggcggctgggtgcacgccgacaatgcccccggcggcggcgccatgttcaccgtgcggctcccggcggcaccgccggaggtcgtggcccagatggaccattgagtccggctcggcgggcacgcccgggcgctcagccggtggccgctgcctgcggcgcgggccgcgggcgcagcagcggcgacagggccatgatgagcacggcgctcagggggatcaccagtagcgccagccgcaggctcacggcgtcgcccagcgcaccgatcacgatcgggaacaacacgaagcccacacgcatcacccaggtggtgatcgtcagcccgatgccggcggggacgcccggcaggccgtcggcggcgttcatggcgttggggatcatagtggcgatgccccagcccgaggcgccgaagccgatgagcgcggtgaccggcgtcggcacggcaagggcgagcgccatgcccgccaggcacgccacggcaccccagaccacggtcctcaccaggcccagccggtcgacgatcacgtcgccggtgaggcggcccagggtttcgaagaccatcagcgccacgaagccgaggccggcgacgaagggcgtggcggcgaactggtcggtcatgtagagcggcgaccaggcgctgccacccagttcgatgccgccggccagcgcgccgagcaggcccagtccgacgagcacggccagggtgcgcggacgcagccaagcgcgtccggtggcaacctcggtgcccgcaacctgctcgcggtcctcgccgggcagcatcatggcccagctggccaccacgcagcacagcagcacgcccaccgtcacataggtctgggtgggcacggccatcgcggcgccggccgcggccgatccgaggaagccgccgaccaccgcgccgatgcaccaccagccgtggaaggagttgaagatggagcggcggtagaggcgttgcacccgcagcccgtggtagttcatcgaggtgtcggtgaccgcgtcgaaggcactcatcgcgaacatggcgacgaacacccactcgatgctcccggcgagcgccaggatcaccagcgcaccactggaggcgatctgggcgagcgcggcgacattgcgtgagcggtagcgacgcatcaggggggcggccagccagccgagcgcgatgccgccgatgggtccgatgcccagcgccagcccccacagcgtgttgctgacgtgcagccgttcgatgatctcggggtagcgcggcaccagcgacgcgaaggtggcgccgttgacgaagaagatgagcaggacgccgagccgcgccaggcgcagccgggtgggcacgcgcccggccttgtgggatgccccgtgggctgtctcgtgagctgtctcgggggactccatgccggacgccatcaccgccgccagctgcggcgacggttgaccccgacgccgggaacgtggctgggcagggtgcggcgggccccgcgtcgggcggcatgggccaccagcggggtgacgagcagctccacccggtagcggtggccggcatagggcgcgagcgcctcgtcggcgaaggcgtcgtcgcccttctgcccggtgagtgccagtgagatcagtgcgggcgcgtggtagtcgccgacgctccaggcgtcggggtcgccgtaggcccattgcagcaccttggcggcggtccaggggccgatgccaggctgcgtctgcagcaggcgggagcgctccgcgccgtcggtggcgcgccccagggccctctccaggctagggacgcgtcgcatcgcacgcacgagggcggcggcgcggcgtccgtcgacgccggcgcgggtgaactcgaagctggggatgtgggcccactgttcggcggtgggcggcaccaccatgccgtgggcggggccgtcgggcgtggcggcggggcccggggcaggggtggcgtacttggcgagcagtgagcgcaggcccccgaaggcctcggggccggtgaccttctgctcgatcacggcgggggcgagggcctcggtgaggttgtcggtggcgccgatccgccactgcgggtggtcgtggtgggcgcggcgcaggaggtcgcagtccgcggccagcgcggcgaagccgctcggatcgtcctgctcaccgagcagccgtggcacctggtcgagtgcccagtcggcaccctctccccaggcgcgcgtgacgacgtcggcgtggtggtcgaacaattccaacagcgcggggccatcgggcgtgcgggttgcgcgccaccagtgctgcgcgccgacgcgtcggtgcgtcggatcggccggacccttggccaggcggcccagcgccatgtcgaggcgtccggcggcacccagcacggtgcgctgtgccggtgacccggcggcacccgagcgggcgcccgccatgggctgtccctcggcgccgggcgcgggaggggacgacgccggtcggccggtcgcgcggggggaagaagtcacggcgaccagcgtaggccgccggtgccatgggtccggaatcgccggtcccgggacggttggatgtcctggggacgccgtgccagcgccgggatccacgctccgtgccagggccgcgctcctccacccgcaaccggtttcaaaaccccgcccgcacccgaaaccccactagctggacacctgtgcggcgtcattcccgcacagctgcccacttgacgaccaggacgccgcccaacggacgctgcggccacactcccccacccgcgccggcatccacacacccgcaaccggcttcaacacccacccgcacccgaaaccccactagctggacacctgtgcggcgtcattcccgcacaactgcccacttcacgaccaggacgccgcccaacggacgctgcggtcacacaaccagcccgggccacactcccccaccagcacccgaaaccccactagctggacacctgtgcggcgtcattcccgcacaactgcccactcaggggccggatcgtgtccgcgccaactcgtccacacgggcaccaccggaagataggggcggataaagcaccgactacggtgctttatccgcccctatctcctctaacccgcacgaccctctgtcccacatgacgcagcgggcgccggcacctagaccgtgatcacccgctcgacctgatcgcgcagcgtcgccaggtgcgcggggtcgagcgacttctcggtgatcacgacgtccacctcggacaggggcaggaacctgtgcagggcattgcggctgaacttggttcggtcaaccagcaggatgcgctggcgggcggcgcgcatgagacgccccttcaccgcggccatcgcctcgtcgggatgcgagcagaccccaccggtcaccgcggtggtggacatgatgcacacatcggggctgacctggtcgatcatcgcctcggtcatcgggccggcataggcgtcggcccagcgcaggtagctgccaccgagggtgatcagctcaagctcggcgctgtcccgcacggcatcggcgatgaaccgggcgttcgtcaccacggtgagcggcgccagctcccccagccccgggaacaggtgccggcaggtggtcgaatcgtccatcgcaatcgtcgaactgggcgccaacaacggcagggccgcgtcggcgatgcgttgcttggcgtcgagctcggtgcccatccgcatcagcgacgaggcctcggccatcgagaacggagcggccgtgacgcgtccgtgggagcgctggatcagtccggaggtctccagcgcggcgacgtcgcggtagacggtcatcggggagacgccgagctcgtcggccagctccttcaccgcgatcgtgccctcgcgggtcaccacctggagcacgtcgtggatccgcacatcgcgcgatgtggccggctgttgttccacgtgaaacctcctgcttgtcgagcgccccgcttgtcaaacaccctgcctgtcaaacaccccgcgtcgagcgccccgcggacgccggcccgcctacagcgtcggcttgacgggcaggacggcccgcgcaacctccgtcatggggtcggcaccggcatcgttgagcaaccggttgacggccgccagcagcggcatgcgctcggcgagtcccccgctgatctgctccacgaaccttacggccagtgcggtggccggcacgccctcgaccgtctgctcgaggcgatccatctcggcgagcgcctcctgcggctgctcgccacgaccgaggcgcacgccgtagaccttgttgcgtcccgacaggccggtcacctcgaggtcgccgacgcccggcagcccgtaggcggtggccggatcggcccccaactgggcgcccagcagcgacatctcggcgatcgcctgggcgaacgccgcggccttcaggttgtggtgcggcaccccggtcttctcctccagaccgtccgcgacgcccagcgcgatggcgtacacgttcttcatgggtgcgcacacctcgacgcccgtctcgtcatcggtgtgggcgatcgcatagttggccgtggcggcctgcgccgcgtagctgcgcgacacctcgccgtcacggcagccgaagatcgtcgccgtcggcagcgcctgggcacactcgttggccttcaccggtccggcgatcgccaccagcggcggcagggtgacgcccttggcggcggcgatcgagcggatggcctcgggcagcaggccgatgcgtccgtcgtctccctcggagaagcccttggacgtcatccacagcgcgtcggccttcgcgatgccgggaagcgccagctcggccacccgcggcacgcccaccgaggccaccgacatgaccaccacctgggcaccgtcgagggcctgctcgagctgcgcggagcggaaggttgccacgccgggggcaagcggcacattggtgcgcgggtgcggcttgccggcctccacggcgtcgagcaggtggtcgtcgagccaggtgccccacaggcggacgtcccagccggcgtcggccagcggacggcacagggccgagcccatggctccggctccgagaacggtgatcgtgggcattgtttctcctcttgttgggggtgatgacgggttggggacgcggggtggcggcgctagtcctgcgacagggccgcgagctcctggaaggtctcgcgcagcgccgggtagagccgggcgtgcaccgcggcgatccggcgatagcgctcatggagctccatgtcggggtgcaccgtctcgccgaagctggccatcgccctggcggagctggccacatcgggtgagccatcggccaggggctcggcatgggcgttgatcgccgccatggcgagcacggcggcacccagcgccgagatctcctcttcgaggcagaccgtgaggggcactccggtgacatcggccatgatctggcgccacactcccgagcgggcgccgccgcccatgatgcgcagctgggtgatcggggtgccggtgccgtcggccagctcaccgaggttgcggcgcatctcgaagcagatggactccagcaccgagcggtacaggtgcgcccgggtgtgcgtgccccgccaaccgacgacggcgccgcgggccagcgcgtcccagtagggcgattgcacggcgttccagtacggcagggtgaccaggccgtcggccccgggggcgattgcggcggcggccgcattgtcgcgttccacgtcgggatcgccggggtggtcggggtcgccgaaggtgtcgcgcacccagccggccaggtaggagcccgatgactgcagcacctcgagcacgtagtttccggggatgcccgatacgtgggtgcggaacgccgggttgtagatgtaggagcccgattcgacgccggcgttcaccgcggtgcccatgttgaggtagccgacgcccgggtcgacggcggcggcgccgatgcccgcagcctgtccgtcgccgagtccggcgatcaccgggatgggacgcgccaggccccattcggcggccagttcggggcggatgtcggcgatcggtgaggcgggggccaccagttcgggcatctggtcgcgtcgcacgccggcgatctgcagcagctcgtcggaccagtcgcggcgctggatgtcgaacaggcccagcgaatcggcagcggcggtggatgaggcccagcgtccggtgaggttgaacacgatggcacccagcacatcggtgaccttgtcggcacgggcgaaccactcggggtggtgctgcgtcacccaggccatcttgtagatcgcgggggtgacgccggccggcttgcccgacagctcgtgcacgtgggcgctgccgtggcgttcgatctgctcggcggcgcgcccgtcgagccacaggatgccgttggccaggggcgtgccgtcggcgctgaagggggcgaaggattcgcgctggtgggtgatgccgatggccgccacccggtcacggtcggcctggctgagcccgccgagcacctcgccgatggtctcgtggctggtgcgccaccacagcgcggggtcgtgctcgtagtggtccatggcgggtgtcaggagtgggatcggacgccgggccgtggcccacacggtgccgttggtgtccacgacgatggccttggtggaggtggtggacgaatcgatggccacgacgagtggcccctgctgggtgcgctgacgctcggacacggtgtcccctctcagatcaacgttgatcgagtcggcgatgagttttgcctcaagctaccccaaattgtggttacttcaccagcttttgtgtgaatttgggggaatcgggggtgccgagaactggcgcggcatgggcccatacatcggccccccagagccccgcgactcgaacgttcaacctgacgtggagagttatccacagggttatccccacatgtggattacttacacacctgtaactacagctgtggatcacaggcggtggagcctgtggacaactccccacgacgggcgggcggacgcctcatttcgcgatccccacgcgtcatcggcaacggaccggcgcccgggtgcacacaggatgtggaaaccggatgtgcacacatgtggaggacgctcgggtcggcaccgggcaacgcaccgcccgctcaggtgcccggcgacaccaggatccgatactgccgggcccagggcatcacgcgggccgggtcgcgtccggacagcacgcacgccgccaggtagcgcatcggcgcatcgatcgcggtgaagaagtgccggtagccgcggcacaggtagttgaccttcggcccgtccgcagggccggccatcgggtcggctttcgccgggaggtgcaccctcgtgggccggccctcacccgtgagctgtgcctcccccatgagccgggcctcccccgcgagctgtgcctcccccataagccgggcctcacccatcaactgggcctcccccatcagccggttcttggggcactcgccgtggcaggcgaacagcaccgggcactcacggcagcgcgccgggaggtcggccttggcgtcgccgaaggtgcgctgccgcgggtcggcaaccatggccgccagcgaatcgtcacccacccggccgaggcggtgcgcggggtcgacgaagtgatcgcacgagtagacgctgccgtcgtgctccaccaccaccgcgtcaccacagtgttcccggaacatgcacgacgccggctcatcgccacaccatgccgccagggcccactcgacgttcatgacgaacacctgccccacgtcacggtgcaaccactgcgagaagacgtccacctggaactcgccccatgcgcccggatcgacgctcagcccacgcaccacgtgcccgggacgcgccgggtcgggcacgacgatggggatgtactggtggaaatccgagccgacctcatcgcgcaggaagcggtagacctccgcaccgcggtgctggttggccgggtgcaccgtggtgaaagtgttgaagcgcacgccgtgctcgtgcagcaggcgcgcggcacgcatcaccttcgcccaggtgccccggccaccgcggtcgacgcgccagcggtcgtgcacgtcgcggggcccgtcgatgctcagccccaccaacacgtcgtgacgcgccaggaattccgcccaccgttcgtcgatgagcacgccgttggtctgcatcgaccacgcgaagtgacgcccgggcggcacgatccggcgggccaccgcgaaggcctcccggtagaagtcgagcccgcgcagcgtcggctcgccgccctgccagcagaactggatggcggtgtcgggcgaggcgtcgatggcgtcctgcaacaccgcacgcaccacctcgggggtcatgcgcagcgacgacctcgggaacagtgcctgcttgtcgaggtagaagcagtaggtgcactccatgttgcaggtgggcccggcgggcttggccatcacatgcggggccgggcggacgccgcgggaaccccgctgggcacgaagcgggccgcgcaccggggccggggcgcccccagggccgatggagggactatccatcacgttcaccaccgtcctgaatgatcgttatcgggctcttcgcgatccggggtgtagcggggggttgagtctggctggcgtgtcggggtgggtgtgagggtcggggtcttccgatgatgggagttcctacgctgcccatctgaaagaccccgacgtgtcccacgctacctttgctgcccccgatctgaccacgttcgcccgcctggatgacctcggcctcgtggtggtgggccagagagtcctcccggatcgctgcgaggtggcctgccgggtggtggacgatgaccggtggtgtcgcgagtgtgggtgcgaagggatcccccgcgacaccgtggtccgtcgcctcgcccacgagccctcgggctggagaccggtgacactggtggtgcgagtgcgtcgctaccgctgttcggggtgtgggcgtgtgtggaggcaggacaccactggggcggcccagccgcgctcgaaactgtcccggggcggactgcgttgggccctggaaggcatcgtcgtccaacacctcaccgtcgcccgggtcgctgagggtctgggcgtgtcctgggactgcgccaacacctccgtcctggaggagggacgcagggtcctcatcaacgatgagcatcgcttcgagggtgtgaccacgatcggggtggacgagcacgtgtggcggcacacgcgcaggggcgacaagttcgtcaccgtgatcatcgacctcaccccgctgcgcgagggaaggggtcctgccaggttgttggacatggtggagggccgctccaagaaggccttcaaggagtggctcagccagcaagaccctgcgtggcgcgaccggattgaggtggtcgccatggacggcttcaccgggttcaagaccgcagcgaaggaagaactccccgacgcggtggaggtcatggatcccttccacgtcgtccagctcgccggcgatgccctggaccactgccgccagcgcgtccagcaagacaccaccggacatcgaggccggtccggggaccccctgtacggggtgcgcaagaccctgcacaccgggatggatctcctcacagacaagcaacgcacccgcctggagggcgtcttcgcccaggacgctcacgtcggggtggaagccacctggggcatctaccagaagatcgtggccgcctaccgcgatcccgaccccaaggccgggcgagcccagctggcccacgtcatcgaggtcatcagccgcggcgttcccgccgccctcgctgagatcatcaccctggggcgcaccctcaagcggcgcgccacagacgtcctggcctacttcgagcgcccccacacctccaacggcccgacagaagccctcaatggccgactggaacacctgcgcggctcagccttgggcttccgaaacctgacgaactacattgcccgcagtctcctcgaggccggaggattcagaccccaactacaccctcaatcgtgaagagcccgttatcgtcgccggccgggccacgcgcaggggcgccgccgtgtcggcgtcgccgactcgttcaccttttgttcatctcgaaaatgtgagatgaattgcgtgattgaacaataacaagctaatgtcattcccatgaatcgcaccgacatctgggccaggacatcgtccgcccatgccatcgtgcgttgtagtgcgctttgtactgtgcatcagcaccgcacgccctgttgtccgtagcaagcatcgggtcccccaagagacccctgtcgaccgtgacaacctcgctcacttctcctcagtgaccgtgcccccgcatcccatgaccggttggatccggatggcctgactcaccctctgacaaggggagtcacacatcttccgctgcggcgggaccttgcccgcccatcgccggcacctgccgtcatgcctgttgggaacgctcctgcgaacgattgacgcaatcgttcggaattgccttccagccatcactgtcgcattacccgtgcgcgacgccgatgccggtttgcccgcatcaccacattcattgattcgacgcgcccctgcgccttcgattcacaccccattacaggaatcctccatgcacaaaaagcgactgttccatattccgctggcattgctcagcgccctgctcctcgtgctcacctccgcctgctccgcgtccaccgacgacggctcgggcacccgggccaatgcgggtgccagcgccagcacgcagctgcagaccgtcaagatcggcgccgtgcccacgctcatcctgggcttcctgcaggttggtgaacagcagggctacttcgccaagcagggcctcaagctcgacatcaccccggccgacagcggaccgaacatcatctccagcctggccgccgggcagtacgacctggcctacaccgcctacgcccccgcgctcgtggcggtggccggtgggcaggacctgcggctggtcgaccacctcgacaatgtgtccgcggccggtcacaacgccgggctgctggtgaagtccgattccccgatcacccgctggaaggacctcgagggcaagaagatcggcgcgaatgcgccccgctcgcagctggtgttgtggatccaggcggccatcaaggccgacggtggcgacccgggcacgttgcagatcgtgccgctgccgctcaaccagatcgccgacaatgtggcccagggcaagctcgacgccggctcggtgaccgagccctatctcacccaggcccacaactcgccggcgctgcgcgacctgggcgaccccgccaccgcgggattcagtcagggcaccccgtcgggtggcgtgttcaccagcgagaagaccctgcaggccaagtccgatgtgatcaccaagtaccgcgccgccttcgcccagaccatcgactacgccaacggccatgttgatgaggtgcgcgcccagggcgccaagctcgtgggcctgtccgacgccgccgcgaagacgatcacgatcgatccgatctccaccgatgtgaaggcccaggacttcggacccttcgtgaaggccctcaccgagctcggctggaccaagaccgacgtcgatatcgaaaggttcctgtcgcgatgagcagccaagtgacaacgcgcgcgctgacccccgtggagggcgagttgctcggtgagctggccgatccgggctctccgggagcctcccgggccgcggcctcccgccccggggccaccacggaaggggacgcatcggccgggacgaccgcatcctccgacgtccctcctcgacgcaccggcatccgcgccctgctcgacggcgggccccgcgggttcatccgcggcctgacaaggccgggagccctgggtcggcatcgggcactcatactcgggacggccgggatcgtcgccctcggcgcggtctggcagaccgcggtggggctgcgcatcctcaaccccgagatcgtgcccggggttggcgccacactggccgagctggtgcggctggtgggcctaccgggcttctatgtgaccctgggccagacgctgctctccgcgggcgtcggcctggtgctggccctggtgatcgccgtgcccgtggggctcgccctggcgagcagcgcgtggttgcgtcgcctgctcaacgccaccatcgacgccctgcgcccgattcccccgatcgtgctgctgccgctggcgatcctcgcgatcggcggcgggctcggcttcaaggtgacgctggtgttgcagggggccctgtggcccctgctgttgcagaccagctatggcctgcgcgcggtggacccattgcagaccgacgtggccgccagcttccgcatcgacccgctgcgtcgcctgttcctgttccgcatccctgccgccgcgccggtgatcttcagcgggctgcgcctggccgcgagcactgcgttcggggtgtcggtgatgaccgagctggtgggcggcgagcggggcctggggtcgatcctggccatcgcgcagagcggcaacaacgtgccccgcgtctacgcgatcaccatcatcaccggcctggtgggactggcgatcgccttcttcttcggacgcctggagcggctgctcctgccttggcaggaggccacccgatgagcgcgacactcgccggccgtctcacgacgccgctggtgccggtggccgaccgccgctgggcccgctacctcgttcccgtgctggtgccggcgctgttggtggccatctaccagctgatcagtgggtcaagcccctacctgcccggtatcggcgagatcgccgccgccagtcgccagatgtggaccggtgccgggttcagcgccaatgtggtgccgagcctgaccaatcttgcggtgggctacctggccgggctggtgctcggactggccgtgggcgtcgccctgggtcgcgcggtggtgctgcgcgagctgctggcgccggtgatcgccttcgggctcaacctgcccggcgtcgccatgctgccggtgttcctgatcgccttcggcatcgggccgcgcatgcagcagggcgtgatcgccttcgcggtgttcttcgtggtggtgatcaacaccaccgccggcgtgcgcaacaccgatccgctgctggtcgacatggcgcgggtctaccggctgccgcgctggcgtcggatctgtcaggtgatcctgcccgccgcctcggtgtcggtgcttgccggcgcccgggtggggctgtccgcggccctgctcgtgatggtggtcggcgagatggtgggcgcgtcgaacggaatcggcgcacaaaccctgctcgcccaacagaacttcgactacgcgcagatgtgggccggcatcgtgctgctcgctgcgctgggcatcgtgctcaatctcggcttccttgctgcggaacgccgactcacacatcgtctgcggctaccggccgcgaacctgcaggagacatcatgaccgaacccattgtgaaggttcagggaatcaagaagacctatatatccgacaagggcgaccacattgccctggccggcgtcgacttcgacgtggcacgcggcgaggtggtgtcgatcgtcgggccctcgggcgccggcaagaccaccgtgctgcgcatcatcgccgggctgttgagcccgagcgccggacgcgtggaggtggccggccaaccggtgtcggggcaaccgcccgagcaggtggggctggtgttccaggactacggacgctcgctgctgccgtggctgtcgatcaccggcaacgtggcgctgccgttgcgctccaagggcgtcgaccgggccggtgcccgcacgctggcactcggtgccctggacgcggtgggactcgccggccgcggcaaggcacatccccgcgaactgtcgggcggcatgcaacagcgcgtcgcgattgcccgggcgctcgcctatgagccgcagctgctgttgatggacgagcccttcgcctccgtggacgcccagacccgcatggacctggaggacctggtgctgcccctgcgcgaccagttcggcatcacggtggtgatcgtcacccacgacgtggacgaggcggtgtacctcagcgaccgggtgatcgtgctgacgccgcccccgtcggtggtgagccgcatcgtggaggtcgacctgcccaagccccgcgaccagcagcgcacgaaggatgatgtgcgcttcgcgcggctgcgcggcgaggtgctcgacctggtgcgtggacgcgagccggaagcgcgggcggcatgagcgcgccgagccggaatccgacggagccacacccggtgacgcagggtccgcgagcacaggacccggtgaccccggtcccgggagcacaggacccgcgagcacagggcccggcgacacaggacccgcccccgacggcactgttcgaccgccgcacccgcgacgcggccgcggagcgtcccttccggggatcgggccgcacggcggggcgtccgaacatcgtgttcattctggccgacgacctgggctggggcgacctgggatgcttcgggtcgctgcacaaccggacgccctcgctcgacgccctggcgtcgcaggggctgcgcttcacccacggctatgccacctcggccacctgctcacccacccggctgggcctgtacaccgggcgctatccgggacggttgaccgcgggcctcgaggagccgctgggcacccgcgacgagcaccacggcatcccggccgaccacccgaccctgccgtccctgctggttgacgtgggctatcgcaccgcgatgtgaatcgccccgagtttactagaggctcgcaagtgccgcctcggcgggtgccgatgcggggtgattgtgatggtaggtgtcctcgagctcgacgggcgggatcatgccgatctcgccgtgcagccgccggtggttgaaccaatcgatgtattctgcggtcgcgatctcgaggtcgtcgatgttcttccagggcccgcggttgcggaccagttcggccttgaacagcgagttgaaggcctctgccagggcattgtcatacgagtcgccggtggagccgaccgaggcggccgcgccggcctcggcaagacgctcggtgtagcggatggcgacgtattgaacgcccttgtcactgtggtgcgtgagcccggtgacggcctggcctgcgtgatcgcgggtccagatgcccatctcgagcgcgtccagcgcgaggtccgtccgcagcgatttcgacagctgccagccgaccacgcggcgggagaacacgtcgatgatgaacgcggcatagacccagccggcgaaggtgcggcagtaggtgatgtccgcgacccacaactggttcggagcggtcgcggtgaagtcacgttcgaccaggtcaggacgatcatccgggccacgaccggagatcgtggtgcgcgggcccttggcccggctgacccctcgcaaccccgcgacgcgcatgagccgctcgaccgtgcaacgcgcgacggcgacgccctcgcggcgcagctgggcgtggaccttcttcgccccgtagacgccgaagttcgccgcatggacgcggtggatctcgaccagcagttcctcgtcgcgtagtgctcgcttcgagggtgggcgggtcttgaacgcgtagtacgtgctcggcgcgatctgcgtgcccgctgcggtcagcgttcgacagatcggctcgacgccgaactcatgcctgtactggtcgatgtactccacgatcaacgctgtgggcggtcgagctccgccgcgaaaaaagccgaggctgaacgcaggatcgagttcgccctgcgcagctcacgcacttccttctccagctcgaccaggcgctgggactcgctggtcgtggtcccgggacggtgcccctcgtcgacctcggcctgcacgacccagttcctcagagtctcgggattgatcccgagctgctcgcccacacggcgaaacgtgcccgacctcgtcgatggatcgcgccgtgactgaactgccatcctcgtggctctctcccgaagctcgtcggggtacttcctcggtgctgccatgctcctcatcctcccgtggattcagagcctccaccagacccggggctattcaatgatcggcaagtggcattgcggatggctgccctggttcagcccgttgaaggccggcttccagaccttctacggcaacctcgacggcgccgtggactatttcggccacttcgacacctcgggccagcccgacctgtgggacggcgaggagccggtgaccgagcagggctactacaccgagatcatcggacgccatgccgcggcctatatccgcgaggcgggcgatgaccccttctacctgcaggtgaacttcaccggtgcccactggccgtgggagggccccgacgacgaggagctgtcgcgccacattgccgacgagccggccgacacgcatgaggaatcgctcaggcggttgttccatgccgatggcggttcgctggccaagtacggcgagatggttgccgcgctggatgcgtcgatcggcgaggtgttggcggccctggacgccaaggggatgcgcgacaacacgatcgtggtgttcgcctccgacaacggcggcgagcgctgggcgttcatgtggcccttcgtcggcgagaagggcgacctggaggagggcggcatccgcgtgccgttgatcgtgcgctggccggcggtgatcgatgccgggcaggtgagcgacctgcccaatgccaccttcgactggaccgccaccctgcttgacgcggcgggtgcgacgcccgatgcggaccatccattggacggcacctcgttgctggggtggctcaccggcacccagggtgcgccgcagcgtgacctgttgtggcgcacccgcgagcagggcgcggtcaggcgcggccactacaagctgctggtcgaccgacacgggcattccgtgtggcacaacctgttcggcaccgatgggcgccccagctaccgactgttcgacctgtcggccgatggacgcgagaaggccgatgtggccgatcagcgtcccgggttggtggccgagttgaaggccgtgtggcgcagcttcgacgaggagctgttgccctatccggacgcgtcggcctgggatgcgtcagcagatggtgcgtcatcccggggcgcgtccacatccggccgatcaacacccggccaatcaacactgggccgatcaacaccgggccgatcaacgacagggggtcagtgtccggggcttcccgactgagcaacgcagccagcgttgccgcagcagcagcaccgtcacaagacactcacacacaagaccctgaaggaacagaccaatgaccgagattgatattcatacccacaccgccctgtcagatgccgaggccgtggtgcgccatgccgatggtgggctggacgacgccacgaagccggccaccggtttcacgcgccagctcaatgcgggcgtggccgagcggctgggaatcgacctggacgacgcctcgaactccgaatatgaggtggcccgcgcacacctggtacgtccggctgacacgctggagatcctggacgaccaggggcgacaggtgtggaatgtgcgcaagttcgatttcctgaaagatccgcaagttcccgcgacggtgaatccgagcctgtgggtacatgcgaagtctgatcgactggccggattgttcgaggtggttcccgacacgatctaccaggtgcgcggattcgatatctccaatctgacgctggtgaagtcgaagaccgggtggatcgtgcttgacgtgctcaccaccaccgaaacggcgcgcgccgcgctgaagtttgccgaggagggattgaacgccgatattgcgaacaacatccgggcaatcctgatcagccattcgcatgccgatcacttcgggggcatcgagggcatcatcgcgtcggagcgcatcgggcgcaccgaggacgggctggtgccgatctatgcaccggcgggcttcctggaggaggccgtcagcgagaacgtctatgccggaacggccatgtcaaggcgctccgactaccagttcggcactgctgctgcggcgcgggcccatcagggatcgctgccggggttgtcgcagatcacgccgaagggcacggtgaacctgccgcgtcccacccatgtgatcgagcacgatcagacgatcgtgctcgacggggtggaggtgttcttccagttaacccccggcaccgaggcgccggccgagatgaacaactacttcccgcaattccgggcgctgtggttggccgacaacaccctggccaccctgcacaacctgtatccgattcgtggggcgcaggtgcgcgacgcgaaggcgtgggtgaactacatcctcgacctggtgcatcgtttcggggcgcaggccacggtggcgttccaggcccatgagtggccccacgagaacaccgccgagcagccgaatgcggtgcgtgaatacctgttgaacacggcggcggtgtacaagtacatccacgaccagaccctgcaccttgccaatcagggatataccgccgatgagatcgggcggcgcatcgaggtgccggatcagctgttgaagcattggtacatccggccctattacggttcggtggagatcaatgcccatgcggtgtacaaccgctacctggggtatttcaatgggaatccgatcaacttgttcccgttggccgaggagcagtttgcccgcaagttcgtggaatatgggggctcagccgatcaggtgctccagcgggcgcaggccgatttcgatgccggcgactaccagtgggcggcctatgcggccaaccaggtggtgttcaccgatccggacaatcagcgcgctcgttacctggcggctgacgccctggagcagttgggctaccagtcggagccgtcgatctggcgcaatgcctatctgcagggagccgaggagttgcgtcacggcgtggacagctcccagcagctgatcggcaacaagggggcactgctcagtcacgtgtcggtggagtcggtgctggactacctggcgatctcgttggacggccagaaggcggccagtgacgacttcgagctcgagctgacggtggagcatcccgataccgggcaggacgcggagagctatctgctctacctgcgcggtggggcgctgctgtatcaccgcatcgagggttcggacggcacgcgtccccatgccaccctgctgcggtcccagctcggtgcgctgattgccggccgtccggtgccggtgggcattgagcgcgacgcccacgacctactgggacgcctgcagggctatctggtgaacctggccgcttcctcgcggttcaacatcatcgagccgtagcaccgcccgctccctgctcaacccccagcgccccgcggcccgcggctcacgccccgcgctgacggtggaggccccaagggcggagccccgggatccggagtcatacgacctcggaccccggggctttcgggcgcgtgggggctcccggaaccactggggccttcggaaccaccagaaccaccgggcgtgcccggacttcgggcctgcggaccgcgaggatggcagcaactggaaagcgggggcttcggtgctcgccggtgctgtcgtgtcgggctcccagtcccgacgcttgaaccggcaccaccatcggggcagacccccataccttcgcgccggagaatgcgtacgccgcacccattttttacatggtgccgcgatgggacagtcccaaacggacacggtggtgttcgtttcgtaccgaaggacaccatctcggcgaagcacgcgcccgagtgcgtcacgaatggacgtccacaaggcacagcgtggacgtccgccgcgtacgcaatggaccgaataagtgtgacgtacgcacttcctgaagggatgaatgccccggatcgggcctgcgggcgcgaagtggatcgtgcccgggagcacggaccaaacgggccgccggagacaaatgggcccgtcggagacaagctgggtcgtcgaagacaaagggggccgtcggagacaagctgggccgtccccgggggcacacaccggatggcgctgcgaccgcatgtggacaacgccccacgtccatccccagacggcacgcgcagcgagaatccgcgctgttccaacacacactgtgggcatgccagtaaccgtgagaaacatcaccacccgcgagttccgcgacaacctgtcggagcagctcagccgcgccgcctactcgggcgaccgcatccagatcttgcgcaatgggcagcccatcgccatggtcgtgtcgatggacgacgccgaggagctcagggagctcgattactacaaggacgccgccgattaccgccgcgccgtggccgaacgcaatggcgaccccttggccatgcccacccgcaacgacgtgatcgtcgcggatggcgccagcgcccggaacgacctggccaggcggttggggttcgaatgaggcccggcatcacgcgccagcccgatccagacgcgcctggcgcgcaaacaccaccaccatcacgaccgtcgccgcggccgtgatcgccatcgcaaggcggaagccatcggtgaagtcgggcaccacggccaccgcccacaccagcacggtgttcgacagggcgccggccacctggcgcaggctgttcaacagcgcactggcgtggctgatgtcctcaccggtgagccccttcagcgctcgtgcggtcggcagggcactcatcaccgaggtgcccaccacccgcaacaggtacgcgccggcgatcgcccacggcgccgaggcgggtgacaccgccagcagggccacggccgacaccacggtgatccccgaaccccacgcccagatggtgcgcaggccccgggcatcgaacacccgccccgtcaacggcgaggcgatcacattcgacaccgccccgggaagcatcaccaacgccgtggcgaaccccgagcgtccggcatgcgactcgagcaacaccgggatgatcgtctcggtgcccaggaagacgccgaaggcaagcatcacgcccacggtcatgcgacggaaggtggcccccttcagcagccgcaggttcagcagcggttgggcgctggaccactggcgtcgcgcgaaccacgccacgaacagcaggccggccaccatcatcgacacgcccaccaacggcgcctcctgcaccgtggagatgcccgccaggaacagtcccatgcccacgaacgacaacacgaacgacggccaatcgatggcgatcttccgggccgccttgatgttgggcagcgtgaacaccgccgcggcgaacaccaccgccatcatcagcacgccggcaccgaacagggcatgccagctgaggtattcgagtatcacgcccgacatcaccgggccgatggccggaccggccgacaccaccatcatgtacagccccagcacggtgcccatccgccgcggcgaggtgatgcgcagcagcgcgatctgggcgaacgacatgatgatgccgctggccaccgcctgcagcagacgcgccgccagcaccggccagaagttgtcggccacgaagcccagcaccgaagcggcaatgaacagcccggtggaccacaggaacaatgcccgggtgctgaaccgctcgtacagcatcgccgacacgggagtgaccacccccaccaccagcacattgccggtggtgagccactgcgccaggctcagcgatatgccgaagtcgtgcatcatcatcggcatcgcggtgaccatcagcgtctggttgagcaggccggtgaatgccgccgccaacaacaccgccgcaaccaccagtcgcgtggtccaattcagctccatgccactccccatcacaccgcgacctgcgaaatggcacgtcacacgattcatccgccacaaggccccacgtcacagggccacatcacgcgactcatgggcccgacggctcatggttcccgctgctcgggatcccgtgggcagcggtcccgatcaatcccggggacccgagaaaacgcaacccgcgagatccaagaacacgggcaatccaagaacccaagcaatccaagaacccgagcattccaagaacacaggcgacccaacgccacagtgtgcgcccgatcacatgccccgccggatcatttcgcacactggccacctggcgcatcccgcgagcaggcgagcagacaggccagcgggcagctcagctgatcaccagcgcgatcgcggccacgaaggtgagcgccaccacgaccgtgcggaagaacgacgggttgatgcggtgggcgagccagcgtccgaacagcacggtggcaaggatcaccggcaccatcgccgccaccagcggcaggctcgaggtctgcagcatgcccaggctcagcgagatcggcagcttgatcaggttgaccaccaggaagaaccaggcggtcgtccccaggaaggccgtgacgctcaggccctccgccaggaagtacatggtggtcaccggcccgccggcattggccaccatggtggtgaacccggtcagtccgccgaatccgaagccgcgccacgagaatcgcgcccgggtgcgcgcccaccagccctccgaggacgttccgccggaacgcgccgacacgaaacctgccggttgggactcgccaccccctgcagctccgccatccccggcaagctcgccatccccacccgcagatgccgcagccccccgatccccgggcgacgacaccgccggcggctccgcgggcaccgagcccgccgtggcagcgcccgacaccccatagcccgccaaaccaccacccagcgccgcgcgccgacgcttgcgtgccatggcaagcaggttccagatgatgaagaccagcaggatcaccccgatcgtgcgtccggtggccgtgtcgtcggcaagcgccaggaagacggcccccacgccgatgccgaccaccacattgggcagcaaccgacgcagcacgccccagtcgacgtccttgcgataggcccagatggcacaccagtcggccacgatgatcaacgccagcgacagccccgacgcctgccgcgccgggatcacattggccaggatgccgatcgccaacgtgccggcccccggcagcaacgacttgtcgatgccgacgatcaccgccacggcgatcaccgctgcaagttccatgtccatgcccgtctcctccagccgtcctcgcccgctgcgtgcgtacaacctgcgtgcccacaacctgtcggcgcacagacctgcgtgcatccgcctacgcccgcacacctgcgccagccacgatccagcacgattcttgcagtgatcccgccaaatgtctttacaaatggcgtccatctcgtttagtcttttggcacgctccaacacaggggcggagagcacggcgacccagcggccgcacacgcccagcaacaccgacagcaccagcaccacgggcaacaccagcagcaccggcaaccgccaacaccaacaatcggcagcaccgaattgatcccctcaccggcgatggggattctcaacgaggagaacgcatcatgtcccagacaacgactccggccacccagaaggcccgcaacaccaacgatcccaagtactccaagctggccatcggcgtgtgccccgaccagtggggcgtgtggttccccgacgaccccaagcagatggccccgcgccaggcgatgcaggagatggccgaggcaggcttcgagatcctcgagaccggcccctacggctacttccccaccgacccgaaggaactgaagtcgtggactgacgagttcgggctcaaggtggtggccggcaccggctggggcatcctgcacaaggccgaggcctgggccgagaccgaacgccacttccgccagatcgccgagacccacgccgccgtcggcgccgagtacatcgtgcacctgccgccgctctaccgcgacgacaagacctgggagttcaccgacgaccgcgtgctcagccccgaggcatggcacctgtacgtcgacaacgccaacaagctcggccagatcatgctcgacgactacggcctcaagatggtgctgcacccccacggcgactcgcacatcgagacccccgacgagatcgcccgcatcttcgacgccaccgacccgcgctatgtgaacctgtgcctcgactcgggacacgtcgtctacggcggcggcgacccggtggagctggtgcacaagtaccccgagcgcatcacctatgtgcacatcaaggccttcgatccgaagatcaccaaggaggcccacgacaaggactggcccttcggcgaggccgtcaccaagggcgcctcggtgcgtccgccggccggactgcccgagatgcacgccttcatcgacgcgctggccgagctcgacaaggacatctactgcatctgcgagcaggactgctacccctgcccgcccgatttccccaagcccaacgccatcaagatgcgcgactacctggccgagtgcggcctgggcctgaagtgaaccggccctgacccgagccagccatcccaagcacaagacctgaggacaccacaatgactgtacgaattggactcattggcgccggcggcatgggccgcgcccatgtcgagcgcatccagaacgagctggcaggcggcgaggtggtcgccgtggccgacgtcaaccccgacgccgccggctatgccgagagcatcggcgcccgctacttccccaccgggccggaactgatcgccgacccgggcgtggacgccgtgatcatcgccaccttcggcaaggtgcacgcccccgacgtcatcgcggccatcagggccggcaagccggtgctgtgtgagaagccgctggccaccaccgcccaggactgcttggacatcctggccgccgagcaggaggccggacgcaagctggtgaccgtcggcttcatgcgtcgcttcgacaagggctacaacgagatgcgcgcccagctcaccgagggccagcacggctacgccaccatggtgcactgccgccaccgcaatccctcggtgccgggaaccctgtacaccacccgcaacatgatcgatgacaccgcgatccacgagatcgacatctgccgcttcctgctcgacgaggagatcaccacggtgcgcgtcgacacgccgcggcgcagctcgaacgcaccgcagggcctgcaggatccgctggtgctggtggccaacaccgcgtcgggcgtgcgcatcgacgacgagatcaatgtgaacatcaagttcggctatgccatcgagtgcgagctggtgatggagtcgggcaccgtgcggctggccgaccaggaccacaccatcctgcgcgacatcgagggcgaccgccatgcgatctgccgcagccacatcgaccgcttccatgacgcgttcaacgccgaggtgcagcagtggatccgcgccgtggagcgtggcgagcacgccggctcaacctcctgggacggctatgcggccacctgcgtggtggacgccgccatcgaatcgttggagcaccagggccgcgaagtggccgtgcagatgatcgatcagccggccttctacgccggctgatcccaccgccgaccgcccactgcgcatccgcaggaaccaacccgatcccccgacggatggggcgggccagccccatgatggccggcccgccccattcaccatttccttccaatccattccattcccccaccccattccccatcgacgcatttcccaccggcgcattccccgacccgtcccattcatcgtcaggacaaccacgcaaggagacgtccaccatggttgatatcgcacttgatccgaatatgtactacgcctcgatgtcgacggcgcagaccctgttcaaggccgccgaactcggcttcgattacgtggagctttcaccgaacaccgaattccatttctggcaccgctgtcccaaggccgacgatgatttcgtagcggggctcaacaaggcccagaaggacagcggtgtcaccgtgcgcacgctcaatccggtgttcaactggtcgtcccccgacgagcaggagcgcgccgcccaggtgcgcaactggcgtcgcctgctggagctggccgaccagatcaacgtgcgcgagatcgtctcggaattctccgggaacccgaataccccggtgcgctgcgaggagcagtggtacaagtcgatcttcgagctggcccctgatttcgagaaatacgggatcacgctgagcatggaggcgcatccctatgatttcgtcgaacgccatgacgacgcctattcgatcgtgcgcggcacgaaccttgactggatcggctacgaattctgctgcccgcacaccttccacctcgacgacggcgtgggcgatgtggagcgcatgatcaccagctgcgcgcccaagctgcgcgaggtgcacgtggccgacacgctgaaccatcgcgccaacgacggcaaccgctacatcgtcaacccgcccggcgtcgacgcccgggtgcaccagcacagtgagatcggcaagggcgaggtgcccttcgacaaggtcttcgagacgctgcgcgccgtgggcttcgacggggtgctgtcactgtgcgtcttcggcttccacgagcatgccgacgagatcaaccgccgcatgctcgagcgcgtccggtcagagttcggggcctgatatcgcgtcccggcctgcgcaccctgccctagcctgacatcggacccggccacgcaggcgccgggacgattcaccacctcccttgatccgaacccccgtggtcaaggacgaagcgacagcggcaaggagacctccatggcgggcggatcacgaccgacccaggccgacgtggcacgcctggccggggtgtcacgtcagaccgtgtcgttggtggtgctcgacgatccccgggtctcgccgcgttcgcgagcggcggtgaccagcgcgatggcccagctcaactaccgtcccaatgtggcggcccgggccctggtctcgcatcacacggggttcctggggatcgtcttcagcgacctggccaaccccttccacgccgagttggccgaggccctgcgcgccgcggccgaccggctcggcttcgtgccgttcatctcgccggtgggccagagcgccgacgaggagaaggtggccatcaaccgcttcaccgagatggcggtcgacgggctcatcctcgtgtcaccactgtccgacaacacgacgctcgaggccctgggcgcgcaggtgcccacggtgatcgtcacccgcaactcggggcccgccaatgtcgacctggtgcatgccgacgaccgcgccagcgccgcccaggtcacccagcacctgctggcggccggctacgacccggtggtcttcctcggctatgagcgccgcatcgagggcgactcgtcgctggcccgcatcgacggctaccgcgccgcgatgcgccgggccgcgcgccccgaacaggtgcagatcgtcacccagggaggcgtgccgcagatcgtcggcggactggcggcctccctgacgcgcggcttcggcctggtctgccacaacgacctgatcgcgctcgaggcctgggcggcactggcggaactcggcctggaacccggacccgacgtgggcgtggccgggttcgatgacaccggcatggcccgtttcccgggcgtcggcctcaccagcgtgaacaatggcaccaccgggttcgccgacaccgcggtggagatgatctcgcaacgccttgccggacgcaccgcacgccgcgaggtggtcctgccgacgcatctgatcgtgcgtcgctccacgctgcgcgaccagccggacaggccaccgcgtccggcgcagcagagataacccccggggcaattggaattgattatcattttcatgtcgcaccgactatgaggcaccccccaacccgcctgtgaccagccatgatggcgccgacgggccgcccgtccagcatcagccacgcacctgtccccggccagccccatgctaatgaaattaattcgcatttgtatttgcaagaattatccggaacatcattgatttcacacgtatttcgtcgcacaatgattccaaggtcccccgcccacatatcgctcccctggtcgatgcatcccgtatcgatgctcccctgatcgatgcgaccccgaaaggaacaatcatggctgaacaggacgcacgcgcagagcacaccatcgccgaacaccagcacggcccgggctgcggccacgcgaccgtgcagcacggcgaccacgtcgactacatccatggcgatcaccgccatgcgctgcacggcgaccactacgacgagcacggctccgatccggacacgcccgccgagcacaccatcgccgagcaccagcacggcccgggctgcggccacgagaccctcgagcatggtgaccactacgacgagcactgataccgcaccacccggtgggcccgtcctccagcagatccggagggcgggcccactgccctgccccggatcagctgacagcgattccacccgccccctcccggcgtcgccacgatggcaagctggaggaaagcagtccgcgtcgcgtgaggtcgcggagcatcccggcaggagaacagcatggccatccaggaagtcaccttcccatcgtccaacgggcgcgacaccatctacggctggatctacgagccaacccagcccgcgcgcggcgtcgtgcagatcgtgcacggcctgggcgagcattcgcgccgctatctgcacatgatcaccgcgctgctcgacgccggattcgtggtggccgccgacgaccatgccgggcacggcaagacctccaccgaatcgggggtgtggggcgacaccggcgagaacggcgtcaccaccgtgatcagcgacgaatactcactgcacaagctggtgcgcgacgaccaccccgacctgccgttcttcatgttcggccactcctggggctcgatgatcgcccgcggcttcgcctcggcccatggggccacgctgtcgggactggccctgtgcggcgtggccgcgcagatcgacggcgtcgagaccaagcttgaccgggtgggcctggacgccgccctggctgccggccccggcaccgcgtcgggtgaggagttcgtgggccagatcttcgaggacttcgtctcgcgctacaccgatgtgcgcacgccgaacgactggatcgcactggaccccgatgtggtggccgaccatgcgcgcgacccgttcaacaactactacaagccgatgagcctgcgcttcgtgcacgacttcgtcaccctgtacgaccaggtgaacgcccccgactggtacacctcgatccgcgccgacctgccggtgctcgtgctcgccggcgaccaggacccggtggccaactacggcgagggcgcctatcacgtggccaaccagctcgaggcgtccggacaccgcgatgtgcgcacccacgtgtacaccggataccgccacgaggtacacaacgagccccagacgcgcgccgacgtcgagagtgagctcacggtgttcatcgacggccacctgcagtaggcgatcgtccggatcgggccaccctcgaccggaacgcatctcaccgaagcaattcacgcgttaccggtggattgcatcattactcgttgcggtgcagctgtgcaacgcaagatgttgcacggttgcatcgcaacagccgaaactccttgcagcgtgggcgcgtgtgcccggcttcgtgatctcggggacttttcaggggaccccctgaggtggcatgctgacggccggaaaccacacgccggacaaggaagtcaccatggcagcaacccgggccacccagcacgtccccaccttcaactcaacaatcttcgcccaccgcgggctgcccagccgggcacccgagaacacgctggccgccttcgacctggcagctgacgagggcgccacctggattgagaccgacgtcgacatcatcgccgacggcacaccgatcatcatccacgacaccgccctggaccgcaccaccgaccaccggggcaagctctacgacatcgcgaccgccgaagagctggccggcatcgacgccggatcgtggtttgcacctgagttcgccagcgaacgcgtcatcaccctggatgccctggtcgacctgctcaaccgccgcaagctcaatgccaacatcgagatcaaggccaacgagcagggcgccgagcgcaccatcgtgctggtcgacgccatcgccagctcactggcccggctcgatcccgagcgcgagatcatcatctcgtcgttctcgcagccggtcctgatgaccttccacgcccgccatcccgagtacgcaatcggcgtgttgtacgaaaccgccgcactgtacgacgactggctctcggtgctggaactgtgcggtgcgagctacatccaccccgaggacgccgggctcacccgcgagcgcgtgcaggccttccgcgacgccggctacggcgtgaacgtgtggaccgtcgacgcccgcgaccgcgccaacgagctgctcaactggggcgccacgggcgtcttcaccaatatcgccgaccagctcatccgctgacccgacgcccccgggcgtccgatcacgatcccgtcccctcggtacccctgccggcaccccccagtcggcactctgccccactggcacccccggcccaaccccggccgcacttccgcatcaccgtccgcgccatccattggagcgcgtcaccgcatcacctgctggaacgcgccgcctactgaaagagcctgctcatggccacgtccacgtcgtccacgcgacgcttctcactacccgtcttcctgcgcaaggggcgtatcggccccttcctcgccgtcgtgatgtcgggccagatcatctattcggcattcgaggccttcaagggctcgctgatgatcccgctgcagcagatgctgggcatcacgcagacccagttcggcatcctcatgagctacatcggcatcgccatgttcctgtacgtgccggccgggtggatcaacaaccgcttcaaggtgcgcaccatcatcctgtggtcgctgggttggcgactggccacctacctggtgctgttcctcctgaccccaccctttgcggtgatgagcgtgatcgccgtctcgtggggcgtgttggacgcgatcgtctggccagcggtggtcaatggcgtgtcgatcctgtcgcaggaccaggacaaggagggcaagggcctggcaatgggcctgctggagtcgatccggcgcctcaccgagttcctgatgaacggcctggtgatcgtgatcctgatggtctggtctgatcacaccgtgggcatcatgcgcattgccgccatcgtgtacgccctgctcatcgtgcccatgatgatcgccgtggcacgcctggtgcccgacaccaagatcgcccaggaacagggcaagtctgattcgttggccgccctcaccggcctgttcaaggtgatcgcacgcccgcgcgtctggttggccggcatcgcagccctgaccgtgtactggtcgtacatcaacctgatgtacacctcggctccctatctgacgcaggtgttcggcgtctccgccgggctggccggtgcgttcggcatcttcaacaccggcctggtgggtatcttcgcgggactcctgtcggggctgttggccgactatgtgttcaaatcgtccaccaagatgatggcgatctcgttgggtgcggtcgcggtggcctgcgtcatcgtcatggcgctaccggtgcgctcgtccatgatctggccgatcatgatcatgctcatcgtggtggccatcgccaccttcctgggcaaggccgtgatcctggcgccggtggccgagctgaacctgcccgagggcatctcggggtcggccatgtccgtcggctcgttcctggcctacgcctcggtgttctgggcatacaccctcaacggacacctgatcgacgccaacgccggcaacccgcaggccggttaccgcctgatcttcgtgatcaccgccgtggtggccgtgatcggctgcgtggccgccggccttctgaccgtgatcaaccgacgcgtcaaggcccaccagcaggtggctgccgccgagggcgggacggacgccgcaccggcaccccgggccgagtaacggccgtccggacccgggatggggcactgcccccagaacgggtccgggcgtgcagcgccaggaatgcgcagatggggaggacctttacagggcagacgacataaaggtcctccccatccagcatccacccgcctggcacgggtccggacggcaccccagtggtcagagcggctccccagtgggccctggacccccggcccccggccaatacctccactagatggtcaactgtgcggcgtcattgccgcacaactgcccatccagccaaggaacgccgccgccggggctggaccgtgaggttaggcttacctttgtgactgggacgagcgcagcggcgcgcagtagccgggaaagcacgaccacccggatgccccgcgtccaggacttcacactccaggtgtgcgcgacgcacgaggccgggccctacacgcgattgcgcgtccgttgccccgaactactcaacccacgcaagtccgacgagctgttgcccaccgcatggctgcgcctgctggttcccgacggcggacgccagcaccagcgcggttacacgctggtggagtgtgaccatcgcaccggtgaggccagcatctacatgctgcaccacgatccggccgggcccgggtcgcggtgggcgcgctccgcccgccccggtgaccgcatcgacgcccaactattggccggtcagctgtacctgcagccaccaccggacgccggcgccctgtacgtgggcgacctggcatccgccccggccattgccggtgccatcgccgcggcacccgcctcgtgcgacatcgcggtggtgctgcaggccgaacagggcagctggtcacccgtgccacacaccgcgtgcacgctgaccatcgtgtcgcccgatgccggtgaggacgcgctcatcgaggccgtcaccaccatcccgggccgcgactacgcctggctggccctggaagcatcagctgcccaaccgctgcgggccgcgctcatcgcggcgggcctgccccgcgatgccgtgcagtaccagggctattggcgtcgcggcacgcccatgggacgcaccgtcgagacgtcggcacgtgctgccgcctaaccgctgactgcccgggcacggataggggcggataaagcacggtctacggtgctttatccgcccctatcttccgttggtccatcgacgccggcccgttcgggcactaagtggacacctgtgcggcgtcattcccgcacaactgcccactcagcgggcgtcagccgccgcaatcaggttcttggcgccgagctcaacaccctcgagctgaccgaaggcggcgtcctcatgctcgatgttgatgttcacctgcgggtcgatctcgaccagtgccttgaggaactcggtccaccagggcacatcgtggccctcgccgacggtgacgaagcgccacgcgggatcggccggccaggtcgacacatagtggtcgaagccggtgggggtgcgcagcgccggatcggcaggcaccggcccgaagctggagtcgagcacgccgcgggtgccgacgcccgggaagagcttggtgtccttggcgtgcacgtgcttgatgtgcgaacccagcagcctgatcgactccacgatgtccatgccctgccacatcaggtgcgaggggtccatgttgacgccgacgttcttggcgtcgatgcggtcggcgaactcgaggaagttcaccggggtgaacaccacattgtgcggatgcagttccagggcgagctgcaccccggcgtcctgggcgcgcaggtccatctcgcgccagaaggggtcgagcacgctcttctggtactcgagcacctcgagctgcgtaccgtcccaggggttcaccacccacgccgggtactttccgtcggggtcggtgccgggggtgcccgacatgcagacgatctcgccgacgcccaacttgccggccagctcaatggcccgacgcaggtcgtaggcgtgcttgggcccctgatcgggcagggggctgagcacattgcccgaggtgttcagcccggccagacgcatgccgtgcgcctcgaacgtggccaggtagtcgtcgcgtgccgtctgcgacccgatcaacaggtcaaccgggcagtgcggcgaggggatgaagccgccgacgttcacctcggcgccggtgagcccatcggcggccaggatgtcgagggcctcctcgagcgtgtagttgtgcaggcaggcggtgtaggcgcccaggttgagcgggctgggggcggacgcattggtcgtggttgagctggtcatggtgctttctcctgatgagtgctgggttgggacgagtcctgggttgggacgcgcgctgggtttagacgcgtgccgagctgggaccggtactggattgggaccgacgccgaacagcgccgtcgactacttgatctcgacgctggcgccgcccctgccggccgatgtggccacggcgtcctggatgcgcatcgcgcggtagccgtgcgcgaagctgggcacgggcggaagcccctcgtccagcccgatcacctggtcaaggaaggcgcgcgcctggtaggtgaactgctcgatctgggtattgccgacaccggcgaagtccatcgacgagccgcccttgtaataggggaagctcgggttggtgagcacctgcttggggccgcgcaggccggcgggcgagttggtgtcgtcgagcttgatctcgcccgaccgggcaaggtcgaacgaggcgcgcccctgggtgccgaggacgtgaaagcacagcgcattgggcatgccgaaggcgacccgcgacaccgagatcgatccgatggcgcccgaggcgaagtgcatgttgaactcggcaatgtcgtcattctcgacggtctcggtggcctcggcgtcaccggccgcgccgcgtccgccggccaggccctcgaccgcggggggacgcttggcgatcacggtggcgaagctgccgccgctcaccgaggcgatcggcccggccacgaactccgccaggtcggtgatgtgcgagccgacgtcgcccagcgcgccggaacccatcggaccgcggtagcgccatgcgatcggcacctgcgggtcggccccgtagtcgcaccaatagcgtccgtcgaagtgcaggatctcgccgagcgccccgctgttggccagctccgcgatctcggcgatcgccgggtggcgacggtaaccgaagccgatgcccgagaccacggacgcgtcggcggccgcggcagccatggcggcggcgtcgtcgaggttgtcactcaacggcttctcgcacagcacgtgcttgccggcggccatcagggccagggcgatctcgcggtgcagcttgttggccaccacgatcgagacgatgtcgatgtcgtcggcctcgacgatctcatgccagtcggaggtggcgcgctcgtagccgtagctgttggcggcatcggtggcgaagggtaggtaggcgtcgcagatggccgccagtcgcacctgcggcacgccgcgggtgccgaagacggtgcgcacctggcgccaggcgttggcgtgcgtgcgccccgccataccggcgccgatcacggctactgacagtgtgttctcaggcattcctgtgtctcccttgactggacctgcgatggtccggggtccgtgacccggacgatttaacgcgcgttaaacgcgatgtgtccagtgtcacagcacgacatttgtcctgtcaaggagttgtccgggattgctcaggacgagctgcgcaccgacaacgccggcgccacgatgaactcgcgcccacgcagcggctcgtcatcgccctcggcggcgtcgggatggcgccgcagcgcacgggcacccatccattcggcacgaccctgcagggccaccatcgccagccgggcgagctccccggtgttctgcgacaccgaggtgatgtcgaattccggacgccgggccatgtgcgtgtcatcgaagccgatcaccgccaggtcgtgccccggacgcaatccgcgggcgcgcacgaaggcgagcacgtcggcggcggtcaggtcgttgtgggtgaccacggccacccgctggtcggcctgcgctgccagcaccccgccgagctggggggccagcgcctcgccgcgcggcacctcgacgcgctccagcggcatccccgccgccgcggcggcacgggccagggcgcgatggcgatgggccacccacacctcgcccagtccactgacgaacgagacggccacgatgcggcgccacccatggctccgcaggtgctccacgatcagggcggccgcggcgtcctcgtcgacatgcaccgaatcgaagccgtcgccggccagggccgcgccgatgagcaccagtggaagctgcgagccgatgcgggtgaacgcctcggggccctccaccggtgagaccatcacgatgccagcggcgcgcaactcgcggaagcgttgcagcaccgtggtctcgcgcgagcggtcgtcggccgaggtcgccaccagcggcagcagccccaacccgtcggcctcatgctgcaggttgtccacgacgctctcgaagaacggattgcgcaggtcgggcagcaccacgcccaccacgggcgagcgcttcgacgccaacgacgcggcccccaggttgcgggtgtagccgagctcgtgggccacctgcacgatgcgctcgcgggtgtcgtcggccaccagcgaggagcccgacagggccagcgagaccaggccgcgcgagacgccggctgcccgggcgacatcgcgctgggtgggatcagcggccatcgtcacagcccccgcccacggtgtggctagccgcgctcaacgggccgggagtcgtcggagatccagtcgctccacgagccggggtagggcttcacgccgttgatgccggcgacgtgcatcgccagcagcgcctgcgaggcggtgatgcccgagccgcagtagacggcgtcgccgggcttgaccgcagcgaacaccttcttcagctcatcgggtgacttgaaggtgccatccggctcctgggcctcggtggcgggcaggttgcgtgcgccggggatgtgacccgccttcgggtcgatcggctcctcgtcgccgcggtagcgctgcggtgagcgcacgtcccacagcgtgccgccattggccagcacgtgctgggcgtccacgcgctcgaggtggccggcgcgcagcatgatgtcgcccaccttcgacgaccaggtgggcccggtctcgacgggatatccggcggccttccacgcggcgaagcccccgttgagcacctgcacatcggtgaggccgccgtcggtgagcagccaccacaggcgtccggcggccagggagttgccgccgtcgagcaccaccacggagctgtcctcgttgagtcccttgcggcgcatctcggcctcgaaggcacccgggtcgggcagcggatggcgtccgcccggcacgtcggggttcgacatctccttgttcatgctcacccacagcgagccggggatgtgcccggcctcgaagtccttgtggccttcatccaccgtggcggcggggcccgaccaacgggcgtccagcacgacggggggattgtctgaggcgagcttcgccctgagggtggcggggtcgataagtgtcatggactgctcccttccttggttccagcttgtcatgcgccacccccaaccgacgcccggggatcacccgccggcctgtgccaaccatggtgcggccaccctcggcactgcatatggttgcgttgccatacatcctgtgtgcacgcccttcgaatgtttggtccggtgatcgctacgccagatcgcactgctaccgtcgaaggcgacaacaaaatcgtgtcaggtggcgctccgcgaccgtagttcctttcgcggccgcagccatgccgaaccatctcgccagaatcgcccatccactcggacgggtgctggcttgcagatcagaatccggcagcgaatccccctccgcagccccctcgggccgcaccgttcccctgaccgcgatcacgcatcgattcaatccctggaggatattttgaacgatccggcccgtcatcccgcatactcaatcgatcgctcgcagcttggcgctgtggagatcaacccggtgttcgcccgccccgcggaggccaccgaattctcgaagttccgcctgccggcgtccgagagcctgcccgagaccgcctaccaggtggtgcacgacgaggccatgctcgacggcaacgcccgcctcaacctggccaccttcgtgggcacctggatggacgactatgccaaccgtctctatgccgagtcggctgacaagaacatgatcgacaaggacgaataccccaagaccgccgagatcgaaacccgttgctggacgatgctcgccgacctgtggcacgcgcccgaccccgacaacaccatcggcacgtcgaccatcggctcgtccgaggcctgcatgctgggtggcctggcgctcaagcgccgctggcagcacgcccgcaaggccgccggaaagcccaccgaccacccgaacatggtgatgtcgtcggccgtgcaggtgtgctgggagaagttctgcaactactgggacatcgagccccgctatgtgccgatctcggaggaccacaaggtgctcgacggcaccaacctggccgattacgtcgacgagaacaccatcggcgtggtggccatcatgggcgtcacctacaccggcatgtacgagccggtgaagcagatcgctgccgcgctcgacgagattcaggaacgcaccggcctcgacgtgaagatccacgttgacgcggcgtcgggcggcatgatcgccccgttcatccagcccgacctcgaatgggacttccgcatcgagcgcgtggcatcgatcaacacctcgggccacaagtacgggctggtctaccccggcctgggctgggttgtctggcgcagcgtcgacgacctgcccgcagacctcatcttcaaggtcagctacctgggcggcgacatgcccaccttcgcgctgaacttctcgcgtcccggcgcgcaggtgctgctgcagtactacatgttcctgcgcctgggcatggacggcttccgccgcgtgcaagccaactcgcatgacgtggccaagttcctgtcgagccagatcggcgccatggacgacttcgagctgtggaacgacggctccgacatcccggtgttcgcctggcggctgaaggatcgtccgaaccgcaagtgggacctctacgacctgtcggagcgcctgcgcacgcgtggctggttggtgcccgcctacccgatgccggccgacctcaccgatgtcaccgtgcagcgcatcgtggtgcgcaatgggttgagccatgacctggccgacgccttcctggagagcatgcgcgccgaggtggcctacctggacgccctgccggccccgatgccctcgcagcacaagcagtcgggcttccaccactgagtgccccttcggcaaatcacaccccacccgtgaaggaagcacttcgtgagcagtactgacagtcatgcgaacacgccatcgcggcgcgccgcgccatccaaccaggcagcaccatcgccgcaggccgccccatcccggacagcggcacccgaggtgccggcgcatccaccgcgcttcatgagcgccacccggatggccatgctgacgctggtgaccgtcgcgtcgttgcgctcactgccggccatggccgaatacgggctggcgtcggtggcgctgttcatcattccggcggtgctgttcctggtgccgacggcgctggtcgcggccgaactcgcgaccggctggaagggcggcatctacacctgggtgcgtgaggccttcggcaaccgctggggcttcgtggccatctggctgcaatggatccagaacgtggtgtggtacccgatgcagctggcgttcatcgcggtctgcctcacctatgtgttcggggtgaacatcggcaacaacggcttctacgtggctgccgtgatcatcgtgttctactgggcctcgacgctgctttcgctggccggcaaggggctgttcgccaaggtcggttcgtggagcggcatcgtcggcacgatcttccccgccgtgctgctcatcgtgctgggcgcgctgtggctcactacgggggcgccggtgcagaccgacatgcatgcctcggcgatgctgccgccgtggaccggcatcgcgtcgatcgtgctcatcgtgtcgaatgtgctggcctatgccggcatggaggtgaacgcggtgcacgccgagacgatgcgcgatcccggacgcgaattcccccgcgccaccgcgcttgccacggtgctgatcctgttggtgttcatccttccgacgatggccatcgccatcgcggtgccgcacagcaagctgggactgatggacagcgtcaacctggccttccaggagttcttcaaccactggcacatcgcatgggccacgcccctgatctcgctgctcatcgccgcgggtgcgatcgcctcggtgatcgcctggatctcgggcccgtcgaagggcctgctggccgcggcccgcaccggactcatgccggtggcgctccagaagcgcaacaaggagggcgtgcagtcgcacatcctgttcgcccaggcgggcatcgtcaccgtattggcgctgttgttcgtggtgatccccaatggggacaccgccttcgcgacgctcatcggcatggcgtcggcgctgtacctgatcatgtacatgctgatgttcgccgcggcgatccggctgcgtcacaccaagcctgacgtgaagcgcacctaccgcacgccggcgatgaacctggtggccggcgtcggcttcgtggcctgtgcggcggccttcgtgctgtcgttcatccgcccggccgggttcaccggcatcagcggtgtgggctatccgttgctggtggccgttgtcgtggtggtgctcggcgtgccgcctctgatcctctatgcgttgcggcgccccggttgggacgtgcgctccgatgaggagaaggccgacgaccaggcgatcctggtgaatcccgcgccgaaggactgatagcacgcgccatgttcaaccgccgtgcctgacctgccgctgtcacacgttgtcagggccccctgtggggctcccggcaccggaggcagcggcaggtttgcgtccggccggcgagaccagtgcgcagcgctcagtgcgccgggaagtagtcggggccggcgaggtcgtcgagtaaccccggaccggcaccaccggggtcgctcgaagctgggcaccagcgcaatcggccatgcccttgaccccggcccgccgtcggcatgacgatggcaactcagcaaccaacctgggggcgcaatgcagcgcacggtgcgcagggactacctgctgtggctcacggccaccacatcggacatgttgtcgcgctcggtgtggagcctggcactgcccttcgtgatcttcgggctcaccaggtcaacggccaccgccggagtggtgcaatcggtgggccaggccgcctatctgtgcgtcatgttgttgggcggggcactcgttgaccggatcaaccgccgcaccggcatggtcgtccgcggcatcaccggcatggtgttgtggatcgggctcgggctcctcctgtacgcccatgcgctgagcctgtggctactggttgcgatcttcgtggcggcccagctgtgtgacggcctgttcggcatggccgacaatgctgcgctgcgcttgatcgtgcgcgacgacgagcagttcgtgcaggtgaccggcatcaaccagggacgcgaggcggcggtgcgcgtcgggggcggcccgatcgggggcctgctctacgccgtcggtgcggcgatccccttcctggtgtcgggtgcgctgctgggcctgctgatcgcctccgcccgggcgatcagggctgatctgcgtccaccggctgccccgaagacgtcggagccgcggcgtgggatcgtccgctcggtgggccaatcggtggcccagggcgtcacattcctgtgggggcaccacatcctgcgcaccctggcgatcgcggcgctgttcatcaacgccgccttctcggtggtgatctccaccgccctgctcgggctgttgggcgatgggtattccgcgctccagctgtcgtatctggaggctgtgtatggagcggtgatgctggtgacggcgctcgttgccgcgaaggtggtgggccgtctgcccacgggccggctcctgatgggggcccaggtgttcatagtgtgcgtggccgtgggggcggccggctggcacagctatgcgatgttgttcgtgtggctgtcgctgtatgggcttgtcacgccgctgttcgccacgagcctgtcgggttatacgttcgcgcgcacccccgaccgcctgcaggggcgggtgcattcggcggcggcgctgttggagttgagcgccacgatggtgatccccgccctggccggatggatggtgcacgccggatgcgccacccagtcgtatctggtgggggccgtgctcgccctggtgggggtgggtgtcgtggccgccgaccggggtgcccgccggctggggcccacgcgcacctggcgcgacggcgaggctgatcccggctcagcgcacccacaacgtgacggtgcgtccgagtgcccacccgagcatgacgccggcagttcgtttctcctccggggggctgggcaaccggcccactcaccgacgacggtggcgcggcgccttcccgcgtgcgaaggcgtcgacccagtcggcgaactcgttgacgtcgaggagggtcctgtccatccagtggtcgagctgttcatcggagatgccgccgcgcacggtgatcgtggagcgaagacccgcggcagtgatgacgcgacggggcggcacgaaccagacgaaggcccggccgatccgtggcacggaattccagttgttcaccatcgcgagcccgcgcgacgtcgccttctcggtcatcggcgtgcccgcgaacatcgtcttcatgatgacgttgtcattggcgtagatgaactgcacctgcgtgccctcatcgcgttgatggccgaacccgcgctccggcgtccacgtgagcgcgtgggtcacgtcgtcgcgagcgccgccttcgggcgcacggtgagattcgatgagtgccctcaggcgactggggagcatgggacgcacggcgcccgcattgttggttacgcccacgatcaatcagccttccgcgcccatgccgcacttgtcttcggcgacatcttcaccaccttggtcagcgaatcgaccgcgccacgcatggctgcgatcaattgcccttcatccagcccgtctgccgtcatgatgaacgagtcggcgctcacattccacgatgtaccccgcggtggtgtcatagcgtcgaagcaacactcccggtcggcgggggtctgatcggtggagtgtgcggatggcgcgggtggggttgtcgttcagtgacaggtcggagatctcgacggcctcgaaagcgggctggtcggtgcggaggatcgcccgtcacctggggcgttgcccgtcggtgatcttgcgggagcttcaccggaactcgacgaagacccgcggctaccaggccgtgaccgcagacgtcagagcgcagcgtcggcgggctcgcccgcagcagcggaaggtcgcgggggatccggtgctgcaggcgagggtggaggcggatctggccgcgtcgtggacgccgaacgagatagcgggccggttgcgtctggaggcgacagacccgaccgttgaacgcatggcgaactctgctgacgcacgcggccgaaccgtctccggtgaggctatctaccagtacatctacgcaatcccgaagggtgagctcgcccgcaagggcatcttcctgcagtccaagcggaccaagcgccgaccacgtacgaccgggcggacgcgcggtggcccaatcgtaggtatggtcccgatcgcggagcgaggtgaggacgccgcccagcgtcgggtgccgggcactgggagggtgacctgatcatcgggaagaacggcacctcgtgcgcggcgacgctggtggagcggatgagcgggttcaccgggctgctggccctgtcctcgaaacacgccgagccaaccgctgacgcggtcatcgagtttttcaacgacttgcccgagatgatgaaggcatcgttggcgtgggaccagggcagcgagatggcccagcacgcgaaggtctccctggccacggcgatgccggtctacttcgccgatccccactcgccctggcagaggcccagcaacgagaacacgaaccggctctaccgggagtatctgcccaagggcacggtgatccccgatcaccagccctacctcaccaccatcgccgaggagatcaacaatcgaccccgccgccgactgggctatctcacgcccaccgaggcattcgctcgactgctcgccggcgagccccatgttgcttcgacgccttgacatcgcccgcggcacctttgtcatatagagggtggcgtcggtcgacttcatgttgaactcgttgaagaccatcagaaccgtcggatagtccttctgggcgatcttcaccgggctcaccacggcgacacgtagcaggccgttgtcgctgggcggctcgaaccgaatcacagcgttgctttccgccggcacctcccagccgccatccacctcggctggcacctgttcggtgacctgaacgattgcagcctgcattcgctcagcggtgacgccaggtaatgtcattgtcttcctctcattccacgatggagttatcgctgtggaagcgtcctaggtgtacttccccgtgacgttgtgaacgcgggctgagggagtctggccgccgatcccggtgtggggtctgtggtgattgtagtgatggagccaggtctcgtaggctgcggcgcgctcggcttcgctggcgtagggcttcgcgtaggcccactcgacggcgagggttcggttgaaccgctcgaccttgccgttggtctgcggccggtatggccgggtccacttgtgcttcacctcgtcgccgagcgcgtcagcgaaggcgcctgaccggtagcaggaaccgttgtcggtcatcaccgcggtgactgtgacgcccaggcctgcgaagaacgcgttcgcgcgggtccagaaccccgctgcggtctctttgcgctcgtcgtcaaggatctctgagtacgcgatccgggagtggtcgtccacggcgtggtgcagataccggtagccgcgagagccggctgccccggcacgggctgccttgtcgcgggccactcccgcgtgacggtcctgcatggatccgcgaccgtgggcacgccacccgccgccgtcggggatccggccttgtttcttgatatctacgtgcacgagctggcccggcgcggcgacctcgtaccgtgtcggcttcgggcggcgaaccggcagcccggtggcctggtcgatgttgatcagcttcggcatcttgtatcgggcgagcacccgaccgaccgtggaacggtgcaaccgcaggtgatacgcgatccggtgcggaccccaccggcgagtgaaccgcaacgcgacgatccgatgctccgtcttacgcgaaagccggttcggtgacgaggtgggcctcgaactacggtcgatcaacggcagccctgcccggtacctgtcggcccaccgcttcaccgtcgcgggcgagcactggaaccgttccgccgcccgccgcaacgaccagccctgttccacgacgagaacagcaagacgacgacgcccttccggtgtcaagggtgcgttagcgtgagtcacgaagacctccgtggtcaggagagtgagtgtggtaacccacatcctgcccggaggtcttcgctacctcacccgttcacaacctcccggggaagtacacctaggacgcggtgaacatagatcgtgtcgtggttacgtctcaccgcctgcacaagattcagcagcgccgcagtcgaatcatcagcgtggtagggcgttccacgcaagtccaaggactccatcgccaggccccgcagttgtggttcgcccaggcgctcctccgagggcgtgacctccacccggtcgccgacgatgcggggcgcgtagatggtgccgtgggaatcgaacaccacccggatggcccaacacccctcgcccgcgttgtcaggttcgagccaggtgtcctgcaactccgccatcgaatcggccaggatcatcatgccatccgagtcgaccatgcccacataatgcgatgggtccgccaacggaccatagaaaaaccgggcatattcatcatccctgctgcgaccgatctctaccagttcgcgccaagcccgaacccacgtcccgcgcatcatgacgtcggcaagatcctggatgcgaacacgcgaaccccacacaaactcatcgtgccccctggcagtcctgaacgtgtcaagcacccaggtagcgtccaccggctcatcactcttcttgacgatcacgttcggccaccacgtgcgccacccctcgtcgaaaaagtaccggtcaccatcggacgagaagcagctcatgacccccatggcgaaatcgttttttcgccagtgtggccacttcaagcggtattccatgagctcgtcaagatcattggccaccaacaactcgccatcaaacaggctcgccaccacaaagacgtttcgatcacgcaggggaggcatatcccgaaatgcatcgggggcgtctctgacctcataaggatagacgactgcaccctccgggatcggcggaggcgtcggcgaaaagttcccgtcatccacgccatcgacctccagatcccggaaatcaaagtcatccttcgccacactggcaatgaactccgccatgtcacgacgcatcaaggtattcctaccgaaccagaaccgctcaggagagcagacgagcggttccgtgctcgactcgatcacatccaacttgattggcctaaaagcgttgttcagataggcgatcgtcccgcacttgggacacacacgggcaatctggccagaaatcatcggatactcggccatcactaccgggtcataccacggacgcgagtcaacgtgaggcaccaactgcttcgcacgaccgcctttacgacgcccccgccactcgacgtcaaccattgccacatcaaagttcgccgccacctggtctgcaatatccccacgcaggcacagaacattcaggcccacctcgaccgtcgaccacacagccggcagcggcgacagagccggcgacaactcatagatgatcggcccaacctgaggaccagtcggggcaccgcagcggcgacacagaccctcgccgccaaacatcggcaccaacgcccgctgccccttgcgtcgccccacgggctctgcgacaacactcccctgaaaatccacgtacccaagggcagacaactcgtcagcacccaatgtcatacaaactcccaccctggagccaccgcgacgatcgcgctgaaaattccaactgatcttgccacgtggtcatccgcgcagtcacccgcgatgagggcgcccctggtccaggagtcgttggggattgccgagcccagaggagaccaggccctagtcgaccaatcccaccatccgcgcgctcacggtccacagctgatcggccagcttgcggttgcgggccttgcgcgaggggcgcaccggctcggagtcgttgtagtacatgccactgatccagtcgcgcggcgggcgtccctgcgccaggaacaccagcgtgcgggcggcgtgctcggggctcaccatcatgcggtgtccgatgcgggagcggtagaacaggcccatcgggcccggcaggtcgtgggcgaagctgctggccacgatgcccgggtggaagcacgccgacgaaatgcccttgagcgaatagcggtggtgcagctcgcgggtgaacaacacgttcatcagcttcgagttggcgtaggcacgccacgccgaccagcccttcttgagctgcaggtcgcgcatgttcagccgtgcggcgcgatgcgccacgctcgaggtgccgatcaccgacgcatgggattcctcgagcttgtcgatcagcaggttcgtcagcaggaagggcgccaggtggttcacctgcagggtcatctcattgccgtcgaggctcagctcgcggtgggggatgatgccgccggcgttattggcgagcacgtcgatgtggtcgaggttgttgcgcaggtcgtcggccagccggcgcacatcattgaggtcggcatagtcgaccaggaagtgctgggccccgatctcattggccaccagctgcgtgcggcgggcgttgcgccccaccacgacaacctggtcgccccgctcagccagctcacgggccgcagccgcgcccaccccaccgctgccaccggtgaccaccaccacgcgtccattcatgactcacagcctacttgtgcaaactggcccacaacccggtcaggctgtgcgtttgcggtgtggacgctgtcggggcacatcaccaccgatagcgccccaaccgacgcccgcacattgcgcgaacccggcacagccgcaatcatcgggagcgcacgtcaacccaaggagcatcccgatggacaagggcatcattctggcgatcgcctgcctggtgggcacgctggctatctgggcggtcgcgctgttctccttcgtgtcgcgggcaccccacaccggctcgggtgccagccagccctccgacgccgcccgtgccgcatggcgccgcaccgggatgcgccacctgcgcacctgggggctgaccctcattcccctgggcgtgatcgccatcgtcttcgtcgcgcgcgccccgggcatcgtggccggcatcgagggcctgatcgtcttcgccagcttcgcctggctggtcgccgccatgcgcgaggcagccaccgccgccacccgcaccgaccccgatgggggcccactgcactgacgcgtgtccccgggaacgccaccccccaccaccgccgggccgcggcaacggatcgggcgaccgcagctggtcggcgccccaccggcgcgccacccactattagtgtcgagctattagtgtcgagacatgaccgaccccacccgcaccggcgacggcggatcgcccgccatcgaattccgcggcgtgagcaagaccttccccgacggcacgcgggcggtggaccacctcagcctcaccgccgccgccggcgccatgaccgtgctgctcgggctgtcgggctcgggcaagaccaccctgctgcgcatggtgaaccggctggcggcccccacctcggggtccgtgctcatcgacggcgacgacgtgagcggcacaaatccggtgcagctgcgtcgccacatcggctacgtgatgcaggaccccggattgctgccgcaccgccgggtgatcgacaacatcgccacggtcccccgcctgctgggacgccaccgcgacgccgcccgcgccgacgcactcgacctgatggacacggtgggactcgatcgcgacctggccatgcgctatccgcgtcagctctcggggggccagcgccaacgcgtcggcgtcgcccgggcgctggccgccaatccgcgcgtgctgctgatggacgagcccttcggcgccgtcgacccgatcgtgcgcgccgagctgcagcgcgacctggtgaccctgcagcgcagcctgggcaagaccgtcctgttcgtcacccacgacatcagcgaggccttcaagctcggcgatcacatcgtgctgctcgacaccggcgcgcgcatcgtgcaacagggccggcccgccgacttcatcacgcaccctgccgacgaattcgtcgcgcggttcatcgggctcggcaccggcgccaccaccctgcacaccgagcaggtggacggccgcaccctggtgctcaacaccaacgagcaaccgctgggactgctcgacgaccagccccgcagtgaccagcccgacaaccctgcccacatcgtggggccgaccgggcaggagcggccctcgtgagatggctcgccaacaactggcccaccatcgggctggccacgctcaaccacctgcaattggcgctgccggccatcgccgcggcgctggtgatcgccattccggtggcatggctggcgcatcacttccgctggacccgcttcacgctggtcaccctggggtcgctgctgtacgcgatcccctcgctgccgctgctggtggtgctgccgctggtcatcggcaccggcgtgcgcgaccgcctcaatgtgatcgcggccctgtcgatctacggcttcgccctcatgatccgggccgccaccgacgcccttgatgcggtgccacgcagcgccgaggtggcgtcgatcgccatgggctacggctgggtgcgccgcttcctcaccgtggaactccccttgtcagggcccggtctgctcgccggactgcgggtggtgtcgatgagcacgattgcgctggtctcggtgagcggcatcgtcggggtcaactcgctgggcatgctgttcgtcgacggcttccagcgcggcatcctggccgaggtggtcgccggcatcgtcgccaccgtcgtggtcgcgctggcgctcgacggcctgctcgtgctgacggggcggctactgatgccctgggcgcgtcccgagcggagccggccatgaactggatcgcggacgcagcggcctggctcaccgacccggcccacctgcagggacccaccggcatctggacgcttgtgggccagcacctggccatcaccggctgggcgacgctcgtggccgtggtgctcggcgtgcccaccggcctggcgatcggccacaccggacgcggacgccaactcgtcgtcggcttctccggtgccgcccgggcgctgcccgccatcgggctgctcaccatggtggcgttgatcgccggcatcggactgatcgggccgctggtggccctggtggtgctggcggtgccctcggtgatcgccggcgcctattcgggcatcgactccatcgaaccggtcacccgcgacgctgcccgcgccatgggcatgtcaccgatgcaggtgctgtggcaggtggagctgccgttggccctgccccagctggtgggcggcgtgcgtgcggcggcgctccaggtgatcgccaccgccacgctggccgcctatgtgggggccggcgggctgggcgtgctgctgttccgcgggttgaagacccaggactatccccagatgctggccggctcggccgtggtggtggcgctggccttcctggtggacgccgccttcgaggtgatcacccgggtgatctcccgatgcgccggggtgggtgccgtcgcgcaggcccactagggccaccagggacactaaccaccgcgggtccacgcgtccaccacgacgacgggcccggcacgccacgaatcgtcccgcgacaagcgctgaccccgacggaacgctaggcggcgggtaacagtgctgccagcttctccaggcgcttcagcgactcggtgagcacctcgtcggcgcgcgcgaaatgcagccggatgaaccggttgaccggctcgtggaagaagctcgaaccgggcactgcggccacgccgatctcacggatcacccattcgcagaattccaggtcggtcgttcccgcgaattgcggcagggccaggaaatcggccacgtcgatcatcacgaaataggtgccctgcggccaggtgatattgaaaccgagccgttccaggccgccgcacagcaggtcgcgcttgtgggtgtacttgtcgcgcagctgctcgtagtagtcggggcccagccgcaggcccaccacggcggcctcctgcagcggggcggcggcgccgacggtgaggaagtcgtgcaccttgcgggccgcctcgatcacccgcgccgggccgatcaggaagcccaggcgccaaccggtcatcgaataggtcttggacagcgaattgcaggtgatggtgcggtcgaacatgccgggcaggctggccaccggcacatgcacattgggggcgtagatgatgtgctcgtacacctcgtcggtgatcacgaaggcgtcgtactcggtggcgagccgggcaatcacctccagctcgtcgcgggtgaacaccttgccggtcgggttcgacggattgcacacgatgatcgccttgacgccgcgcgcgaacgccgcctcgagcaccaccgggtcgaacgagaaatcgggcggatcgagcggcacgaagatcgggtcggcacccgacaggatggcgtcggcgccgtagttctcgtagaaggggctgaacacgatcaccttgtcgccggggtcgcagacggtcatcaccgcggccatcatcgcctcggtgccgccgcaggtgaccacgatctcgctggcggggtcgatggtgcgtccgatcgtgggcgagtacttgtcggccagggcctcgcggaagttctgggcgccccatgtggtggcgtactggtgcgggccctcgtaggccacctgcgccagccggtcgagcaccggggtgggcggcgggaagtcggggaatccctgcgacaggttgatcgacccgggcgtttcggcgttgatgcgggtcatccggcggatcaccgagtcggtgaatgtggacacgcgcgcagacagttgaggcatggctccttctcgggccggcggacggcggggccggccccatccattgtgcccgtccgcacgccccacccggggcgtgacgcatgatgatcaggcgcggacgtggccacgtgcaccgggcccgcggacgtcgcagcggccacgcgtcacaatggaggcgtcccagattccggttcgaggagattccatgagtgtgcgcgacaagttccccgccgatgtgctgaccacgcgtgaccgagggttccaggcgctccagtcggcctacgacctgtgggtcggcgcgcgctacagccgcgagggcttcgaggcgttggcgccccgcgaccaggagaaggcggcgctctacacgctgctcacccgcacgatgaacgcctccttcaccagcttcctggaggacgacgtcgccaccttcatgggcactgcggcgcagcaggcgttggagaacatcggcgccaccgacaccctggcgatcatcgaggaataccgccagcacctcacgccgttcgccgacgcacaggcctggccgccctattcccaggtgcccgaggatgacaacgacaacgagttgatggcgcgtctgcacaaggaattcttcgactaccccgacgacatcgagaccctggcctccgactactacggcaacgaccccgagcccaccgatgcgccgaagctgccctcgtcgggtgaggaacttgcgatggacatcgacgagatcacctacatcatcgaggcgcgcttcatcggcgtcttcgacccgcccaccggcgactacggcacctacgagagctggccggccatccgcctgctgcccaggcagcgccgccagatcatcgagggttggcgctaccagattccctatggtgcccatgccaccggcgacgacctggcggaggcgagcaccttcctgtaccagaacaacgttgacctccaggccgcagcgcaggagcagctgaaggccgcgacgaactgagcggacccctgcgatgaacagcccccagccggccacgacgcggttcgcactcttcctgcgcggcatcaacgtgggcggggtcaaggtgccgatggcgcagctgcgcgaggtgctgacgcagatgggtggcgcgtcggtgcgcagctggctggcaagcggcaatgtggcgttggattggccgggcgatgcccccggcttgcagcgtgccgccgaggccgtgctgggtgagcgcttcggttaccgggcgcgcgtgctcgtgcgtcgtgtcgacgagctcgccgccatcatcgcggcctgcccgtagaagcccgacgacggcttccaccgctatgtggtgttgttcgacgacgccgacgacgccgcccgggcgctggccggcctggcctcccccggcggttccgcagggaatcccggacgtgacgggcccgtggtgcccgccggagcactcctggccggggagcgcgtccagttgcacggcgacctgatctattggcgctgcccgaagggacgcaccaccgacagtgcgttcggcaagcagcagaaccgtgggccggcggttcggcgtccgaccgtgcgcaacctgcagacattgcaacgcatggtgggttgacgcgcggcagcgataaccaagtccccaggggtcgcacccgggccctgggtggacacctgtgcggcgtcattgccgcacagctgtccccttaacggtgcccacctaacagggaaacgggggccggccacccacaagcggccgaaccgcgccgcacccctaggacttcatctggccggtattggtcaccggcggggcacccaggatcatgtagtgggtcacctgcggggcatcgtcggccagggcccgcgcggcggtcagcaggtcctcctcatgaccggtccagcgcaccgtgtgctgcaggatgtgctcctcccagctgggcacggtgaactcctcggcgaaggaaccctcagcgtcggtctgctcaagcagctgccacgacgccgcacccgtgcgcagccgcgccgcccgcaccggccacatggcctcgcggaaggcgtcgatgttctccttcttcacgtgataggtgctgcgcaccaccaccggatcgctcttcgactcgtcgagcgacagcaccggcaggtcggtcgacagggccaccacattgcggtcgagcttgcccttcaccttgatcagcggcagcagcggcaccgacagccccgccagcagcaggaacacgcccgccaccaccagcgtccaggccacgcccacgcgatcggcgacgatgccccagatgaacgagccgatcgcctgtgaacccatgaacaccagcaggtacaccgacaggccgcgggcgcgcacccactcgggcagcgtcaactgcatggcgacgttcagcgtggtgaggctcaggatccaggcgatgccggagatcagggcgatcggccacatcacctgcagcgacaccttggccaccgccagcgtgcccaacccgaacacgatcgccgagatgaacagcgcggtggagttgctcatgatctggcgcaccttgtccatgagcagcgcgccgatgatggcgcccacgcccagcagcacgagcagggtcgaatagccggccgcgttggtgcccatcaggtcgtgcgcagcggtgggcagcagggcccacagggcacatccggggaaggcgaacaggacgcagcggatgaggatgcggcggatgcccggcgccgaacgcacgtagcgcatgcccgacaacagcccgggcagcacctgctcgcgcacggccggctctgctgggtgccacgacgccacaacaccagcgccagggccacggccaggaatgacaccgcgttgatgccgaagaccatggccggacccgacgccaccacgatgatgccggcgatggccggcccgatcgcgcgggcaccgttcaccgtgatgctgcccagcgacgacgcctgcggcagctcctcacggggcaccaactcgggctggatcgcctgccaggccggacccatgatggcggccgcgcagccaaggatgaaggtgaagcccagcagctcccacggccccagccaaccggccgccgtcaccacggtcagggccacggcgatggccgccgacaccaggctcagggtcagcagcagccgcttgcggttcaccaggtcggccgccacgcccgcgaacagggacagcagcaacaccggcagggtgccggccgtctgcacccacgccaccagggcggggctacccgcctgctccaccaggaaccactgggcaccaacgctctgcatccagctgccgatgttcgacaccagctgggccacgaagagcatcaggaaaaccgggcgtcgcaggacggccaaggagccacccccggacggccgggccttttcggtgttcctgcccgacgtctgtttgtcgctcacacccatgaatctactaccgggcccgcgcggaaacacccgtatcagccaccagcgttgacgccccgccgcagcgcccccatttgccgtcccacaagcgcaaacgtgcactgctgcgaaaagccccgacgcccgccgggaaatcgcgcatcgacaggccgatcccagttgttgcccagtcgttacccgcacgacgccttggtaacaactgccgatcattcgcggtccctagcctcaacacgttgcttggccgcggaaccaacgcggcggattggaaggaagcacgtgacggcaatcgagtcgcactacgtggcgccggccccaccacaggtatccacacccgaacccctgcccgaccagcctgccggacgacggctgcgacgacatccccaccggggacgcgccagccgcaacggcctgcgcgagaagttgctgttcgtggcgctcatcgcacccaatgtggtgctcatcgcggtgttcgtctaccggccgatcatcatgaacctctactactcgttgcttgactggacgctgggcagctcgacggccaagttcgtcggcctgggcaactacgtggagttcttcacctcccgcgacgcccccagcgtgctcggcaccaccgccgtgttcaccatcgccaccgtgggcgggtcgatggcgatcggcctgatgctcgccacggtgctcaaccgccgcctgatcggacgcaatgtggcccgcgccaccgtcttcgcgccctatgtgctgtcgggggtgggcgtcgggctggtctggtcgttcatcttcggccccaccatcggcgtgctggccggcgtgctgcgcaagctcaacgtggcctcaccgcaatggttcctcgacccgaagctgtcgctggtgatggtggtgctggtgtacgtgtggaagaacctcggctactgcgcggtgatctacctggcggcgctgcaggccgtgccacgcgacgtgctcgaggccgcagccctggacggcgccagccgcacccgcaccttctggtcggtgatctggccactgctggggcccacgaacttcttcctgctgctcaccaccctgctgggctcgctgcaggcgttcgacatcatccgcatcatgacgcccatgggccagggcaccaccaccctgatgtacagctcgtacctgcaggccttcggcagctacaaccgggccggctactcggccgccatctccaccgtgctgttggtgatcctgatgatcctcacgctggtgcagatgcgtctgctcgaacgaagggtgcactacgcatgagcgtcacgatcaatcgtccccgcggggaccatcgcgagaccgacaccgcccacgacgaccgtgcccgacgcaggacgctcagcaagctgctcaagcgcggctcgctgcgccacgaccgcaccgacaatgccccgatcggggtggtgggacccaccagccgcacgcgcaccctgttgggcggctacctgccgctgatcctggcgtcgctggcggttctggcgccgctggcatggatggtgctcggctcgttcaagggctccagtgagatcgtcaaccagaacgtggtgtggctgccccacgacccgaactgggacgcctacctgaccgcctcgcagcgggtgaacttcccgcgcctgttcgccaactcggtgctggtgaccgccgtcggcgccaccatcaagctggtgctcgccgtgctcagcgcctacgccctggtgttcatccggttcccgttcaagcgggtgatcttcatgttcatcctcgcggcgctcatggtgccggcgcaggtgtcgatgctgccgaactacatcctcatctccgggatgggcggggtgaacacctactggggcatcatcctgccgggcctgggcaccgcgttcggcaccttcctgctgcgccagcacttcatgtcgctgcccggcgaggtcctggaggccgccaagctcgacggcgccgggcacctgagccgcctgctgcgcatcgtggtgccgatctccaccccggcgatcgccaccgtggcgttggtcacgatcgtcgacgagtggaactcctacctctggccgctggtcatcaccaatgacgacacccgcatgacgctgccggtgggcctgacgctgctcaagaacatcgagggcgatcccagcgcctatcccgtgctgatggccggcgcggtgctggtgatcgtgccggtgatcgtcatcttcctattcctccagcgatacatcgtcgccggactcacgcagggcgcagtcgactgatggcgctcacatcccgaggagagaaactctcaatgaaccccgtctcaccaaggaacagtgctccttcacacagcgcttcctcacagggcagtgccgcaccccacgttctctcgacgacgttgtcgcgtcgtcgcctgctgtcgatggcggccctcggcgctggtgcggtggccctggccgcctgcgccggcccgtccacctcaagcggcgcgtcgagctcggcagccgacgccaatggccccgacttcagcggcgtgacgcccgccaccaccatcaccttctggtcgaaccacccgggctcgtcggaggacatcaccaagcagatcatctccgacttcaagaacgagaccggcatcaccgtcaacctggtgaccgccggatcgagctatgaggacgtggcgcagaagttccagaccgcccagaccggcggcacgctgcccgacatcgtcgtgttctccgacgtgtggtggttccgctactacatgcaggactcgatcatcccgctgaccaatgccctcaaggcggccaacgtggacacctccgactaccgcgacggcctgttcgccgactaccagtacaagggctcccagtgggcggtgccgtgggcgcgctcgacgccgctgttctactacaacaagagccactgggcggccgccggactgcccgaccgggtgcccgccacctgggacgagttcgcacagtgggcccccaagctgaaggacgccaacagctcggcccagcatgtctacgagcaccccgcactggccgactacgccggctggaccctgcagaacatcctgtggggctacggcggcggctggtccgccaagggcagcttcgacgtcacctgcgactccgaggcgtcggtgaaggcgctgcagtacgtgaaggactcggtgtaccagggcaagtgggccggggtggcctcgtcggccggcaccgacgacctcgccgccggcgcctgctcggcgacgctgggttccaccggatcgctggtgggcgtgcagaaggctgccgccggcaagttcgaggtgggcgtcggcaaccttcccggcggcccctcggtgaccacgccggtctgccccaccggcggcgccggcgtgggcatccccaagaaggtgccggcggccaaccagctggcagccgcgaagttcatcggcttcctcaccaacccgaagaacaccgtcgccttctcgcagcagacgggctacatgccggtgcgcaagtcggccgacaccagcgagctgctggcgaagaacccgctcatcgagaccgccatcaagcagctcgacgtcacccgcacccaggactatgcgcgcgtcttcctgcccggggccgaccaggagatggccaagtcggtggcgcagatcgtcacccagaatgccgacgtcgcctccaccatgaagtcgctgcgctccacgttggagggcatctacaacgggcaggtgaagtcaaagacctcgtgatcccatcatcacgagcgcgaggaatgcatgaccgtcagggccgttggcgatgagaccgcgccggcggccctgacgctgcccggggttcgcgtgccgcgacgccggggtggcgggccacgctgcccacgattgtccgcggcgggatccgggcttctacgctggagcgggccgcggcccgtgcacggacaccacgtccgggcgcatccacacccccgaaggaccggttgatgatgcaggtttcccccatgagccagatgaccccatgagccgggtgttcctgtgagccaggactccgccgcaggccgctcgtcggcaggtcactcgtcgtcccccaccgacgtgggcgatgacggcgcacgcccgcatcccaaccgcggcatcgtcatggcggcggtgttcatcgccaccttcatgacgtcggtggaggtgaccatcgtcaccaccgccctgccgacgatcatcagcgagctgcacggcctgtcgctgcagagctggatcatgagcgcctatctgctcaccacggcgatcaccacccccatctacggcaagcttgccgacagcctgggacgcaagcgcatcttccagttcggcgtggtgctgttcaccgtcggttcgctgctcagcgggctgtcgccgtcgatcggcatgatgatcggcttccgcgcgctgcagggcatcggcgccggcgccgtgatgccgctgacgttcacgatcatcgccgactactacagcttcgccgaacgcgcccgcatcatcgcgttcaacaacaccgcgtggggactgtcagccctgatcggaccgctgttgggcgggttcctggtggacgcgctgtcgtggcactgggtgttcttcgtcaacgtgccgcttggggcggccgtgctggtgctcgttgcgtggggctacaaggagaagcgccagcccgcgcacggactcaggccggattgggcgggcatctggtggttgacgctgtgcctggtgtgcctgctgctggcggtgcaggacctcgatgtgcgtccgctggtgagcggtgcgctgttcgtggtggcggtggtcgcggcgctcatgctggtgcgcgtggagcggcgctcggccgatccgctcattgcgccggcgatgttcgcccggcccaccttcaccgtgcagatcgtgacggcgaccatcctcagcggggtgctgatcggctaccagacctatgtgccgatgtggctgcagtcgttgtaccaccggcccccgacgatcgccgggctggtggtgacgccgagttcgatcatgtggctcaccggctcgttcttcgtcggcgggctgatctcgcgtttcgtgccgaagcggatcgccgtggtgttcattgcggtgctgctggtgggctatggcgccctggcggtggcgccggccggcttcccggtgtgggcgttctatgtgttcgcagcggtcaatggcaccggcatgggcatcgtcatctcgatgaacaccgtgctcacccagcacctcgtggacccctcgatggtcggctcggccaccggcatcttcaccctgggacgctcgctgggtcccacgttgatggccggcatctacggggccgtgctcaatgtggcgatccgggtgcagctgcgcggccagcaggccgttggtgccggggtggacttcgggcaggtgaacacggtgatctccagctccgggggcgccggctcgtcggtcgaccgcgcggtggtcgacccgatcctgctcaactcattccacgcgctgttcggcgtggtggtggtgatcctggtggtggcgctgctgatcaatgtgttcgacccgaacaagaaggtcatcaggtagcggcggggggacatgccccggggcccaataccgcggtcccaccacaccggccccgaacgcagctgcgcccggcaggtccactcgggacccaccgggcgcagtgatgttctcgcgctggtgcgcatgccctacttgccggcaggcacaacctcaacgtcaaggtggatcttgaccgcgtcggtcagcttcacctcaacgccgtgacggccgaccgtgcggatcggcttgttcgcggtgacggaacgcttgtcgatcgcagggccaccggccttgcgaacggccagggcgatgtcagcgttggtgacggcgccgaagagcttgccggtgtcggacgcattggccggcacctgcacctcgagtccgtcgagctgctcacgcacctgcagggcgtgctcgttgtcgcgaatggtcttcgcgttgcgcgcgcgctggatgccctcgatctccttggcggtgccacggttgtagacaatcgcgaagttcttgggcagcaggaagttacggccatagccgtccttcacctcgacgacgtcgccggcaacacccaggttctccaccggggcggtaagaatgagcttcatttcctgcctcctcagcgggtggtggtggtgtagggaagcagggcgagctcacgggcgttcttgatcgccatggcgaccttgctctgatcctgcacggacagcccggtcacgcgacgggcgcggatcttgccgcgttcgctgatgaagcgacgcagcagggtggtgtccttgtaatcgacgtggtcgacgtgggtcgtcttgaccggaacgaccttcttcttgttcacagacttgcgctgtggaccggccattgtggtgctccttctcgttggcggacgacgactgtgcgtcgtcctgagcccggcatcgatgtgccggaatgtgcctggttcttggaattgttggggatggatcagaacgggggttcgtcgctctgggcgctcgcccagggatcggagaccgggccctgattgccaccttgctggccgccgccggccatcccctggttgccctggggtgcctgctgctgaccgccgccgtagggctgaccgcccccggcgttgccccgcgactggccgccaccggcattgtttccctgccagttgctgccgccggacgcggcacgggtgaccttggcggttgcgaaccgcagcgccgggccaacctcgtccacctcaacctcgaagaccgtgcggcgattgccctcacggtcgtcgtagctgcgggcgcgaaggcgtccctgcacgatcacgcgcatgcccttggtgagcgattcggcaacgttctccgccgcctgacgccacaccgcacagttcaggaacagggcctcgccgtccttccattcgttcgcctggcgatcgaatgtgcggggcgtggaggcaaccgtgaagttggccaccgcggcacccgagggggtgaagcgcagttccgggtcggccgtcagattgccgaccagtgtgattggggtttcgcctgccatgatgcgtcctcgtcgtggttgtgtgcctgaaacggatcgggatgagtgccctcagcctgccagctgcctgccacagtttgcgacggctgtgggcgaatatgcccgccgctgccgcctgtggaaaaccatctgatcgggcaccgcacgctgtgcggcccgagccgatgctcgctgggagcctcaggaatcgatgcgcatgaccttcgtgcgcatgacctgctcgtcgatgcccatgagacggttcatctcagagacgctcgcgggctcacaggtcaggtcgatgaccgcgtagaggccctcggtcttcttctggatcggatacgccaggtgacggcggccccagatgtcgacgttgtcgacggtgccaccttccttggtgatgatcgcggtgtacttatcaacgatgggctgcagctgacgctcatcgacatcagggctgatgattgccatgacctcgtacttgcgcattgcgaactccacctccttcggtctcaacggccatgggtcgttcccatggcaggagggcgtaatgctcggatccgcatgcgtgacgcggacccgacgacacggctcgtacgtgtgacgcacgggtcgaattacatggcccacgcgacgtgcgtgcgggccaatccccaagtttacgcgacgagggggtgcaggcggaaaccgatgcccgggcgatgggggttcggggtgggttggtggcgtgggtggcgtggggcgaaggtgcgctgggtgggcaactgtgcggcgtcattgccgcacaagtgcccagttagtggcggaggcaggcatccgcaggccggaaccatggaaaaccaaagataggtgcggataaagcaccccggacggtgcttttgccgcacctatcccgcgtccacccgccggcccagccccggacatgccctgggtgggcacctgtgcggcgtcattgccgcacaactgcccagttagagaccgaagcaggcgcccgcgcgccgagccagcctgatccggcactcaccggatggtttcgatgcgtctattcaccagaaccatccagttagtcgttcttcctcgggaggttatgaacggttgaggtattggggaaggtccggcaccgtgtaggtcagctgacgcacggcggccgtccttgcgatgcgtactcgcccggcgtcgacatgccacgacacatggggcgacggcgtcctgttcttcgggaccgtcctatgtggggcactgtcctgcgaatgatcccctggatgccaaagtgccgcgccatagtgaagtgccatagtctggccggttcaccgtcgacgccgaggaatggatccatgagcacataccgaaccgaagtcttcgaggacggcgaaccctgctggtggtgcgagcgggaggcactgcgggccgaattggacaccgaggcgggcgagcctgatccctccgtggtcgccgccctggcggaggccgaacaccacccggacctggagatgaaggaggtcatcgccgaagcccgcaactcccccgcagatccggaggacatcgccctggcggaacgcgtcttcggacaggggccggcttccgaacccactggccagggtgacgctacgtcagggacgccgacggaatagggagcggtgagccagacacgtggagtgcaggcgtgggggcgaacgccagccgtccggacgaccgccgaatcaggcggcgtcgctactgctccacaccagcatgtggagttcctgctccaggaagttgcgcacgatcccgatctcttccgaggtgcaactgatgagcaccttgggttccagctcctgcttcatcaggtcgaggcacaggatcacgccggtcacccgatgctcgggcagcgtaccgacgaagacatcgaggccctcaccatcaaccgacttcaggtcgacatatccatagtcgacgggatagacgatgctcgggaaccgtggatgcctggagcccttgggacggtccaatctcaccggacgcgacaagagctcccggaacagcggaccctcaaatgacgtgttgaaacccttatcgcccatgaccggcctcccgccttcttgacgcattctcgcaggccacccgacggtgtgttgggacgaggcgaactgctgcccggatttgctgccggatcatgcgctgacccaaagattggggaggacctttgcagggtagacgacgcaaaagtcctccccatcttcgtttacgggccggcctggggcccgaaggtgggatgggtgggcaactgtgcggcgtcattgccgcacagttgcccagttagagaccgaggcaggcgtccacgagtccgaaccatggagaaccgaagataggtgcggataaagcaccccagacggtgcttttgccgcacctatcccgcgtccacccgccggcacagccccggacatgccctgggtggacacctgtgttggggagcgggatgggtgagtgtgtggcgcgggcccgaaggtgccctaagtgggcacctgtgcggcgtcattgccgcacaactgcccagttagtggccgaagcaagcgtccacccgccgagccagcctgatccggcactcaccggatggtttcgatgcgtctattcaccagaaccatccagttagtgacgggaacgtgtccgcaggctcagccccagctgttgacgatctcggtgaggtcgcggcggcgtccggagtagaagggcgtctccacgcgcacatggcgacgtgccccggtggtgcgcatgacgcgcatcaggtcgacgatgcgggccatctcgtcggcctcgaagcacaggatccactcgtagtcgcccaacccgaacgacgccatggtgttggcccgcacatcggcgaagccggacgcggcgcgtccatggtcggccagcaactgggcgcggtcctcgtcgggcagcaggtaccactcgtgggaccgcacgaacgggtagacgcagatgttgtcgcgcggctgctcgtcagccaggaacgccggcacatgggccttgttgaactcggcggctcggtgcagggcgagctgcgaccatacgggcgtcagcacattgcccagggtggacgcgcgcagcacgtggtaggcgcgctgcagggtctcgtagtcgtgggcgtgccaccacaccatcaggtcggcatcggcgcgcaaaccggccacgtcgtaccacccgcggatcaccagatcggtgtcggcggccacggcctgcaactgctccaacgcctgttcgccggcacccgggccggcagccgcctcggagcggaacacggaccacatcgtgtagcgctgcatgtggttgatctcgtcggcggtgtgcgccatggaagcctccccattgatggagttaggtaaccctcactggacgagttcaacctatcggcccgcactgaatcgatgacaggccgacggacggggttcggcgctcggctgaacgcttgcccgcaagtcgtcggacgcggacgtcccccttgtccctgcggagatcccacttatccctgcggacgcccctacctctgcggaccggggatcagcacctgcccgtcctgcacccaggcggccagtccgccggcaagcgcgaaggcgtcgcgtccctcctggcgcaacagggcggccgccccgttggcccgcaggcccgtgctgctcaccacgatcaccggcttggaggtgtcggcgaggggatcgtcgccccagatggcgtccaccggatcggcccggatggccttgatgtccaccagccgtgaccccggcaggtggccgcgctcgaactcgcggcgcttgcgcacatcggccaccacggcacccttcgacatcagcgtgagcgcatcgtccacgctgatcccgcgcccggactcgtccggaccctccttggctgccttcctgcgccacaacatggacatattgtctcatcgcccgacgggtggccgtccgcgcgtcccggtcgggccgacgagcaaccgacgtgctgttccgcgcacggcccggcaatgtcagtggcgcacgccatgatggaggcaagaccggtcaatccccaggagctgccatgagcgccatcacaagtcccagcgccgacctcgaccccgacgacgagctggacgacaccagcgagctggattcggggcccgacgccaccgggcgtgcggcattgctggtgatcggcatgcagcagggcaacctggacggctgttggcaggccgagcaggtgaccgcgaccgtctccgacctgatcgatcgggcgcgcctggcgtcggtgccggtgatctgggtgaacgacctcacccctcccgcgtcggtgaccggcagcggcgaattgctcagctccctgacctgcggcgccggcgaatacgtggtgctcaagccctaccgcgacggtttcgagtccaccgggctggccgactcgttggccacgctggggtccggcacgctgttcctgtgcggggcatggtcgcacgaatcggtgcgcgccaccatggtcggtgcattgtcccgcggctattcgacggtgcttgtggaggacgcccacacggccccctcacgccatgacggcaccgccacggtgagcggcgaatccatcgtctcggtggtgaacatgatcgcggccgcacccggcgcccccgcccaagacagcagcaccatgccctgttacgacgtcaacttctcggccttcgtgcacaccgacgacaccgccgtcggtgacgaggccctggccgcgcaggagcaggcgcaggacgaggccctcgaccccggggatgacgaccccacagacgacgactgagttcttcccgcgaaccgcttgccatggggctgccagcgcggtactgtgcctgcatcacgtggcgaatcgggtgcaattcccgggctgtcccgcaaccgtgacagtgcgtcgaccaggcgcactggagccggaccaaagcgtgataacccactcaccaacccgtcgcggaccgcgggagacttggggcgccacatccggctccatcggcctttcccagatcctcacgggtctttgaaaggaagcccatgcaggccctccaaggaaggcgccggtcacgacgggtgatggcggccgcggtagcagccctcaccgccatgaccgtgctgccctcccagctcaacgccgttgctgcacccactgattcattcgctaccacgatgcctgatgcggccctaaggggttgcgtcaccacggcgctgaacctcgattccaccgccgctccaacttcggaccagctcgcaaccgtgaccagcctcagttgctctggcaagggcgtcgctgacctcaccggcatctcggccctccccaacctgggcaagctatttctgggcaacaattcgctgaccagcttggccccactcgcgacgtcaaccaaggtcttctcactcgacgtctccagtaatcagctttccgacatcaccccgacggccaacctgaaggcccttgtcagtgtgaacgtggcgaacaaccggcttcgtgatctttccccgctgagcaccctcccgaatctcggagggctgagcatcacgtcaaatagccagaaggcagtgggagcacccgccacctcgggccaagcgaccgcagtcccgacggccattgacaagaccggcacggtgttcaaggccgaggcaccgagcggggtcacggtgagcggcgcgaccgtcacctacccgatcgccggcacgtacgactggtcgttcaaggaccaggacctctacttcaacggcaccatcaccgtcacagtttccgctgcatcgggcgtgaccatcccggacgccgggctgagagggtgcatcaacgacaagttggccctggccccggacgccacgcctactcaagaccagctcgcatcgatcaccgacctctcctgtgtcaacaagggagtcaccgacctgaccggcatatcgcagctgggcagcttgaagaacctcaccctgtcgaccaacaagatctccgatctcacgcccctgactcccctgaccggtctcgaatcactcatcctcaccggtaattctgtcgcggacgtatcgccgctgacgagcctgcagaatctcgctgccctcacgctcgaccggaacaacgtcttgacactgaacgggctgggataccttcccaagctcgcaaccctttcagcatcatcccaattcaagaatgaggggaggacgcgcctggcaagcattgcaggcctcgacaaattgaccgggctcacgagcctcgcgatcaacaacactgacgtatcggacctcaccccggtgactggcctctccggcctcaccagattgttcgcaaccaactcccagatctcgtctgcggcaccgctcgccgcacttggtcggctcacggcccttgatctcagtggtaaccacatctcagatatttcgcccctgaacaagctggacatgacgttgaatgcaatgcgcgtcaccgggcaaacccttgcggcgcccgaggcgaaggcgtcggttgcgacggacgcgccaggcgtcaccgcgctggacggaagcattctcgtggcagctccccctgcgggcctcacggtcaacgacgccaaggtcacctacgcctctccgggcgattacacctggaccttcgaagagaagacccccggcagctatccgaggactttcttcagcggcaagatcacccagagggcaaccgatgccccgcctgcggtcgtgggggtggacatccctgatacgaatttccgtacctgcctcgccggattgctcaaccacagtgatcccgcggcacccatcagcgccgatgaactggctggtctcacctccgtgatctgcgtcgggaaatcaatctcgaacctcaccggggccgcgaacctgaccggagcaactgaactgatcctgtccaccaattcaatctccgacgtcacgccgttgcgtggcttgacccagctgcagaaactctaccttccggggaacaagatctcagatcctgctccgctgtcctcgctcacgaatctgaatgagctgctgttgggacagaaccaggtcacttccatctcggcgttgtccccgttggccggactcaccacgctggaaatcagccagaaatacgacaagaacggaaacaccggtctcaccagccttgacggcgtgcagcacatgtcttcgctgaaggctctgacggccaacaactcccgtatctcggatctggcgccgttgaaggatctgcacgaactcagctcgctctacctgaacaacaactcagtgaatgacctcacggcgctgtcaggactgaccgcgcttgagaagctcgggttgagtaacaacaacatctccagcgttacgccactggcttccctgacgaagctgtcccgaatcgacatcgggaataatcacctcatggacctgagccccctcggatccacggcgattgatgccacgttcaacctgaacgcaaacaatcaggccacccaccttgccacggtccccgtcgggctcaccacgagtgttccgcaaccgcgagacatgaagggcgcaattgtgcccgtcacgcctcctgcaggcctgacgatcaccgatggcaccgtcacttacccaaagtcgggcacgtattcattcacgtggacctcatccaccggggagggtggcaagtcattcagcggaagcgttgaccaagaggtgggtgctgcagtcatcggcgcggcaaacgtgcccgacgcggcactacgctcctgccttgcctcagcagccggcctcgacgccaccgcgtccccgaccgtcgaccagctcaaggcactgaccaccgtgaagtgcgtgtccaagggaatcacgaacctgaccggcgttgagaacctcaccgccgccacgaccatcgacctgtcgggcaacaccctggccgacgtcaccccgctggcggggctcgacaagcttgccacgctcaacctgtcccacaccggactgtcgtcgttgaccaccgtgtccgcccttccagcgctcaccgcgctcaccatcagcggtaatccgatcaccgacctgtcggcgctcaaggcgaagaccggcctggtcctgcaggccaccgacatgaccggcagcgccccggacgtgaagggcggcgtcgccagcgacgtgcccaccgcgttcgacgccaccggcacctcggttccgctcggggcccccgccggcgcaaccgtggcgaacggcaaggtgacctacaccgctgcgggcagttattcatggcccttcaccaccaccggcggagccttctcggggacgatcacgcagaaggtcaccagcgatgcgaccgaccccgacgccaacaagggcgcccaggcctgcgtgcaggccggcaatgtgtgggtcgtggtggaacgcgacacaggccttcagaagggcggctgcgccacgaagttctccaccggcaccgaggcgctgacgagcgcaggcttcaccactgacaatccgaccttcgtcggaaagatcgacggctacccggcaacggcccccgtcgatgaccccgggcactactcctactggacctactggcacggcgtctccgccgacccgacggcgaccacccagacctacccgtggaccttttccgaagtgggcctcggcgactaccacccgcgtgccggatcagtggagggctggcgcttcgcagtgaacctgggcagtaccgacaaggtgcctgccccgagcttcgtgctgagctacaccaacggcgcgtccccgaccccgacgcccacaccaaccccgacgcccacccccgtggcgtgcaccatgtcctaccccgatgtgccgtcctcaatggccttttcggacgacatctgctggctgacacagcacaagatcgccacgggctggcccgacggcaccttccgtccggtcacgccgctcaaccgtgacgccatggtggcgttcctctaccggatggccggctccccggcgttcacgcccacccggcagaccttcaccgacgtcgacgcgggcaacatgttcttcaagcagatcgagtgggccgcgtccaatggcatcgtcacgggctggcccgacggcaccttccgtcccacccagcccatcacccgcgacgcgattgccgcgctgatctatcgccaggcgggaagccccgccgtgacactgcccgaccgcccgtcattcaatgacgtctcgccgaccacgatgttctaccgcgagatcgaatggatgcaggccaagggcatcgccaacggttgggccgacggcagctaccgtccgctcaacgatacgaaccgtgacgcgatcgccgccttcctgcaccgtgcgaccgatcagggggtgctggccctgcactgaaccggtcgcggccatgcggacgtcagccccgcggacgagaaccgtgcgactgtgccccggccgcaggccatccggctggaaccatcccgaaccgaggtcccggcgttgtatccccctgcaacgccgggacttctcacgcccccagccacgtcgaccccaacgctcctccccccagaccggccattcggcttatcctgtgcagcctcatagggtgggcaggtgaccacccccggcattcgtcagcgcgtcgtgggcggactgtcgcgggacgtgctggtgctcggcctgatcgccttcttcgtggcggtcggcttcggcgtgctggtgcccgtgctgcccaccttcgccgcatccttcggcgccaccgacttcctggtgggcatggtggtctcgatgttcgccgccaccaggcttgccaccagccccttctgcggctggatcctggacaagatcggcggacgcctcaccctggccgtcggcatcttcatcgtcgcggcatccagctggctgatgggcgaggccggcgacttctggtggctgctcggctggcgggccgccggcggcatcggctcggccatgttcaccgtgtcggccatgaccctgctgttggcgtccgtgccgcccgacatgcgtggacgcgccaccggcttctaccagagcggcttcctcatcggcggcatggccggccccgcactcggcggcctgctcacccgcatctcgctggtcgcgccgttccgcttctacgccatcaccctggccattgccgggctgatcggcctcacgatgctgtcgagcgccaccacccacgccgatcgtcctgcccacgcgcgcgccaccccgcgtccgctgcgccaggtgctcgccgacacccgcttccaggccgcgtgtgtggccaacttcgcccagggctggaactcgatgggggtgcgcaattcactgattccccttgtcatcgtcgcaacgctcggcctcacccccacctggacgggcatcgtgttcgcggtgtcggcggtggtgcaggtgatcgtgctgcaccccatcggccacttcgtcgacacggtgggacgccgccccgcactgctggccggtggcgtcgtgatggccgcctcgatcgccgcggtgcccctgtcggggtcgatctggatcgtcatggccctgatgtgcgtctacgcggtgggcgcggcggccatgagcactgccccggctgcctccgtcggcgacgccaccggcggtgtgcacggcggcacgcccgtggcgatcttctcgatgagcagcgacgtgggtgccatcatcggtccgctggccgccggcgcgatctcggatgtggccggacgacccctggccttcgccgtgggcgccgtcttcctggccctcagctcgttggtcgcgctgcggatgcccggcggacgtcccgaccactccgcaggatctgtcgcgtccgccgatcccgacgccctgctgtccgaggactgaccgggttgatcgccggcgccgtgccccttgtcggccaccatcacattgccggccaatgtcacagtgtcggccactatctgaggatccaaccatgaccgagacaccccacagcccctcgtcgcacgccgatcccgcgtccaaccccgagctggtgcgcggcgaggacggtcgcgtgcgtccccgctgggctgccacggatccgctgctgcgcgactactacgaccacgagtggggcgtgccgatccgcaccgagcgtggactgtacgagcggctgagcctggaggccttccaatccggattgagctgggcgacgatcctgcgcaagcgtccggccttccgtgccgcattcgctgatttcgagcccgacgcggtggccgcgttcggcgacgacgatgtgcgccgactgcttgccgacgccggcatcgtgcgcaatgaacgcaagatccacgccgccatcaccaatgcgcgcgccacggtgtcgctgcgctccgacggtggcctggtgcagctggtctggggcttccagccggcgccgggcccgcctccgcagtcgtatgccgaggtgcccgcgaaggtccccgcatcggagcagctcgccaaggccctgaagaaggcgggcttcgtcttcgtgggacccaccacgatgtacgcgctgatgcaggcgatcgggatggtggacgatcacctggtgggcgaatcgggaccactggccggctgattccggggcccggacgcgcaccaatccccactaagtggacagctgtgcggcgtcattgccgcacaagtgaccacctagcggtccgtccccgggaaccaggcccaccccgcatcgacgccacgatccagccgccctctgcaccaatcccccactaagtggacaactgtgcggcgtcattcccgcacaactgcccacttaggggctcttcacgatcgagggtgtaggtggggtctgaatcctccggcttcgagcagactcctcgcgatgtagttggtcaggttccggaagccgagggcggtgccgcgcaggtgttcgagccgcccgttgatggcctcggtggggccgttgctggtgccgggccggtcgaagaacgcgaggatgtccgcggcgcgctgcttcagggtgcggccgagcttgtggatctcgacgagcgccgcggggacgccggtggtgacggcatcgatcacggcttgcatcatctgcttgcccttgtccttgtctggttcgcggtaggcggcgatgacgcgctggtagatgccccaggtcgcttccacttcgacgtgttgctccgcggcgaacagcgcggtgagccgatcgcgttgcttgtcagtgaggaggccaccgccggtatgcagtgtgcggcgagccttgtagagcgggtccccggcgcggcctcgatgcccgagcgtggcctgctggacccgttgccggcaccggtccaggccatcgccggcgaggcggaccacgtggaagggatccatgaccgggaccgcggcggggagctcttcggcggcggcggtcttgaagccggtgaacccgtccatcgcgaccacctcgatctgcttgctccattccttcgggcggcccgcgagccagtccttgaacacggccttcgaacgaccctcgaccatgtccagcagccgagccggtcccgttttgttccgattcggggtgaggtcgatgatcaccgtgacgtacttgtcacccttcctcgtgtgccgccagacatgctcgtcgacgccgatcgtggtgaccccgtcgaaccgtgccgggtcatcgatcagctgccgctccccttcagcgaggaccgcactgttcgccgcggaccaggacacgcccaacccggcggcgacgcgggacaccgagaggtggtcgaggacgaggcccgccaacccccaggccagcccaccgcgagagatcttcgcccgctccggcgcggccttggacgtgtcctggcgccacacccgcccgcacccggagcacttgtaccgacgcacccggatcaacaacgtcgtcggccgatgcccgaacggttcatgcgcaagccgacgcgccaccgtgtcgcgagccacgccctcgcatccgcacttgcgacaccagcgatccggttcagcgacgcgacactcgatgaccgcacgatccggctccacgatctgcccgacggcctcaagaccgagctcatcgagtcggcagaacgtggtcagggagggcgcggtgaaggtagcgtggagcacgtcgaggtcttccggatgggcagtgcaggaacttccatcctcgtggagacctcgacccctaccagaccaccgacacgctcaggcgactacaccctcgatcgtgaagagcccacttagggttccgtccaacagaaaccaggcccgtccccgggaaccaggccaaccccgcaccgcaagacgccgcggagcacccccgcacaccacacagaaatgtcagacccctcccctagcgtggatcactccagcccctgctggaacccttcgggcccggacggcccggcgacaccatggagaccgccatgaccgaactacccgtgcccgtgccgggcaccaccagcgacaccctcatgtgggccgatcccaccaccgtggagccggaggccctcgaccagctgcgcgcgatctcgcgcctgccctggctggcgaagctgcgcgtgatgcccgacgtgcacctgggcaagggcgccaccgtcggcagcgtgatcgccatgcgcgacgcggtctcgccggcggcggtgggcgtcgacatcggctgcggcatggttgccgcacgcaccaacctgacggtggacgacctgcccgacagcctgcatgcgatccgctcccgcctcgaggagctcgtgccggtgggatggaagagccacaccggcactgccccggtgctgagccgcgacgaacagctcaaggggcggttcaccaccctgttcgaccgcttcggacagctgcgcgcgccccacatcgacgaccgcgagacccgggcgctgtcgcagtcgggcacgctgggcggcggcaaccacttcctggagctgcaggccgacgacaccggcaccgtatggctcatgctgcactcgggatcgcgcaacatcggcaaggaactggccgaccgccacatcaccgaggccaaggggctcgaccacaacctcgacctgcccgaccgcgacctggccgtcttcctggccggcacccccgaaatggacgactacctccacgacctctactgggcgcaggaatatgcgcgcctgaaccgcgacatcatgatgcgcaccttcaagggcgtcatcaccgagttcttcccgcacgccaccttcgaccacgacgtcaactgccaccacaactacgtgtcgcaggagtgctacgacggcgtcgacctgatcgtcacgcgcaagggcgccatcttcgccggcagcggcacgctggggctgatccccggctcgatggccaccggctcctatgtggtgcggggcctgggcaacgccaccggcctgtgctccgcctcgcatggtgcgggacgacgcatgtcgcgccgtgcggcccgtcgcaccttcaccgtggacgacctcgccgcgcaaacggccggcgtcgagtcgcgcaaggacgagggcgtgctcgacgagatccccggcgcctacaaggacatcgacgcggtgatccacgaccagaccaccgggccgagcccgctcgtggaggtggtggcgaggctgcgcacgctgctgtgtgtcaaggactgaggccggtcacgcgaggccggtcgcaccggtcagacgccgcggcgtccacccctgtggggccagtggaacagctcaccggagttgtccacaacgcttgcggtgggcgtatcggtcacgtccagcgtcacgcgcacccagtggtcggcgtcggcggggtcgtgggcccggtagacgatccgcgggttggtgatcgactccacctcggtgcgcgcatcgggcagccacgcataccggcgccggatcgccaggatcgcctgataggcccggtaggtgggcaggccgaagcccgccagctggtcgggacgctcgggcatcggttggcgcacctcggcgtcgccaccgggacggtcatatttctcgccccggaaggcctgctcgtcgccgtagtagacgcacggcgtcccgccgacggtgcccagcagcactgccgcgaggatggccttgtcggcacccaccttggtggcgatgcgggtgacgtcgtggttgccgatgaaggtgaagggacggaagtcgtcgagcatctcgttgtggcgccccagcgtccactcgagctcgtagaagttctcggtggcaagcgagctccagcacgccttccacagctcgtattcggtgaccgcgtccatgcccgactcgtgcacgatctgcgcgtagtcgccgtggatcacctcgccgtagatgtacagctcggggaagcgctcgcgcaccgtcgccagcaccggcgcccagaattccgggtccaccgcgtaggccgcgtcgaggcgccagccgtccacgccgcgcccacaccagtgcagcatcacgtcggtgaccagcttgcgcacctgcggcgacgcatggttgagccgcaccaggtcgtcgctgccctcgaagttcaggcgggtgggcggcgtggtggagaagtcgatgtggaacatgtcggccaggggcccatccggcccctcggcgagcgcctggcgcagtgccgggtagcgggcgctcacatggttgaagacgccgtcgagcaccagcttgatgccccgggcatggcaggcggcgaccagcgcgtcgaagtcggcgtcgtcgcccagccgcgggtcgatggcgaaatagtccagggtgtcgtagccgtgcgactccgagcggaagatggggcccagcacgaggccgttgcaccccaggtcgatcaggtagtcgagccagttctccaggcgcggcaggcgatgggccaccggagcctgctcatccaggtgggtgggggcgccggtgaaccccagcgggtagaccgtccaccagatcacgtctcgtcgccagtcgctcacatgcatcccctccgcacgcatcgctgcttgtcgcagccaccttgccgtgccctatgggctcacagtagcgggcgcatccgcgagcccggcgcgcgccgatccgcagatcagctggcccagtgccccaagtagaacaatcgcgcccaccagaacatcaacaggagggcggcggcgatgagcacgcccaccacggccgtcctgacggtgcgtgcggtggcgccgtgtggacgccgccccagccagctgccgacgccgatgaacagcgggaaccacaacaggtcggcacggttcaccgacatgaaccaggtggcgatgctgaaggcgaacacctgcaccgccacgtagccggcctgggcccacgcccgacgcaccaggcagcccagcgcggtgaggcagccgatcgccatggagacgatctcgaagcggaagatccaggcacgggtggtctcggtgggccaccgcgcctcgttggtggcggccagggtgttgtgcaggctgtcccagggcgacgtccattcacgctgccagccggcgcgttgcgcgctcagccagctgtcccaatgccccgacagcgtgtacaggtagaccgcgaaggccgccagcaccgccagcggcaccacgagccaggccagattacgcaggcgctgcgaccagctgcccacccgcttggccggttcggcacccgccacggtcggttcgccgccgaacagtgccagcaggccgagcccgcccaccaggaacagcccggagatccgggtgaggcaggccaccgacgccagcactgctacccagccccagcgtccacgacgggccagcacccacgcccagaacgccaccgcgcagaacagcgcttcggtgtagccgacggtggtgaacacggccatcggtgccagcaaccagacgatcgccgcgttgaggccgccgaggcgttccatcgcgaaggcggccaccaggctcgcgagctgcgacaccgccgcagccccgatggccatcggcacgccgaccgcgtccagcaggcgcatcaccatcggcagggccgggaagaacgccatctccttggggtcggcatatccgctggtggcgatgagcatgtagtgctgcacgtcccagttgcccagcgcccgggccggcgtcagcccgctctggcgcatcgccagcagcagtgccgcgcccatcacgagtcgggtggccagccatgcggcgacgatcgccaccgtgcgtgagcgcagggcaggactggtcctggtggccgtcgtgctcactggccggattcctcgtcgcgggtcccggggccgggcatgtcggcgtcggaggtggtggccggggcaggcatggtggcagtcgcggctacctgctcggacgcgccctgctcgtccacgggtccggactggtcagctgcctgcttcttgcggtcggactcggcctcggcgagccacggggcgtccacggcatggtcgagcacgccgcccaccggatcgtccacgaagggacgccggatcgggtcgttccaggggctgaacatgtcgccgatcacgcggctggcaacccacaacaccacgccgatgcgcagcagcacggccagccagtacagcgcgtcggcaccggaaccggcgcccaggatgccctccaggtagccccagatcgccagccagtagagcacctcggcaacgttccaggcggcccagtcgagcaccttcgggcgcgccagcacgagcaacggcagcagccacagcgcatattggggcgaatagtgcgggccgaacacggccacggtcgccaccagcaggaaggccacctggccgagccggggacggcgcggcgcggtgaacacgagccagaccacggccagcaccgcgatcaccacgaagacgctcgccaccacgccgagcagcgtgcccgagacgcccagcagctgcagcgcgtaccagaacgagccgacgcccgaaccgccaccgagcacggtggaccagtaggcggtccagccatgtggggccgtgatgaccaccggcaggttgagcgccacccatgcgacgatccccggcaccagcatccgcagggcctcgcgcatccgcgcggcgcggatgcacagcacgacgaccgccagcaccacgagcacgggataggcgtccgcgcccacggccaggccgaacagcacgcccgacacgacgggcagcttgcgcgcccacgcccacagcgcgagcgacgtgagggcgacgggcaacacatgccagctgatcaggccgctggtgaacaccaccggcgcgatggcgatcagcagtgcgtcgaagctgcggacgcgcaccccgcgggtggcgtcgctgaacgagtcgcggcccatctgcaggtgggcgagcaccagcgccaggaaggcgcagaaaaggccgatggcggccagcacgaagaacatatagctggaatccagctgggcctggcccgaggcgtccgggccgacgcccgcaccgagcagcctgatgatgaaccggtccagtgacgccaagtagcccaccaacaccggtagcgggctggcggcgtcggagtagatgccggcgcccgagccgatgccgttgttctggaagaacaccgggatgtcggaatagcacaaccgcaggaaggggttcaccggcttgccgaaggtgtactgctggcagggtgcctgacgccacaacagcagcacccagttgatggttgacaacagcagcgcccatggtgccggatcgaaccacagtccccccgggcgcgcgtggcgtccgagcgggccgccgatgcggtgggagaggcgcaccgagatcgtcggcaggttgctgcgggccggcgcgggttcctgcggggcggcactcggcacaggaccctgggaggcggtcgcctgcgcgacggctccaggcgcggcgtccgagtccaccccgcgcatgacgtcatcgggcgtggtcaccggatcgccagccccagatccaccccccggggcagcctttccaggtccgccctccggggcgaggttcccaggtccgccctccggggcgaggttcccaggtccgccctccggggcgaggttcccaggtccgccctccggggcgggttcctccacggatccactcaccgggctcacggccccgcagtgcccgccggcgcgggctcaggcgacgccggcggcgcggtgggcacatccacggcgggctcgttcgcagccggggcctccggggtcgccgacgcggtcacgctgggggtcggcgtccgtcggacgctgggacgcacggaggcggcctgggtgggggcgttcgtgttgaagttcagccggtccatgccctggctcgcctgctccatgtagtcctcccacaggtaggcgggataggagtccgactcgaatgcgcccgaggcggcataggggtcgaggttggcgttgccatcgccggcgacgaacatcacggcggtggagatctgcttggtggcgccgacgaaccaggccgacacagtctggtcgtccacgtccttggtgccagtcttggcgatcacctgacggcccagctggcgggcctcggtgccggtgccgctggtgaccaccgattccagggcggtctgcgcgttgtgcaccagcgaggcgtcgatggtctgcgtggccgaagtgtcgccggtgtacaccaccttgccgctggcgtccttgacctccttcaccacgtgggtggtgttgcgctggccgtcattggccagggtggcgaagccagtggcgttgtccaccggactcacctgcccggtgcccagggcgatgcggttgttgaggtcccagccgtcgccggtgggcacgcccgcgtcgttggctgccttcacggtgtcggcggggccgttgggcatgcgctgttccaggtcggtgaacgcggtgttcatcgaatagctggtggccttctgcagcgtcaccgagccgtagttgacgccgccgtcgttgcgcaccaccacattgtcgccattgggcgtgaaggtgctgccggtgagcgtggagttcagcgtgaagccattgcgcaggcccgcgacgagcgcccacgccttgaaggtggacgccgccgggcgcgcggtggtggcccagttgatctgcgacttcaggaagtcgggtccgccgtacagggcgtacacctcaccggtgccgacgccgatcgaggcgacggccgcgtgcagggtgctggcgtcctggttggtcttggccttgcggatcgcggtggacacattgtcggtggcggtcttcaccgccgcgtcctgcatcttctggtcgaaggtggtggtgatggtcaggccgccgccgtcgatctgttcctcactgaagccggccttgcgcagctcctgctcggccatcgtcagcaggaagccgttggtgccgccgtagaggtcggactgggtcaccggcagtgtgtcgggcagcttgtcgtagttcgcatcgtggtcggcctggctgatcttgccggcctcgagcatgccgtcgagcacgtagtcgtagcgctcggtgaggtcgcgcttggcgtcgtcgccattggccgggtcgagggtggaggggctgttgaccagggcgctcagcatcgccgactgcggcacgttcaggccggcggcattggtgccgaagtaggtggtggccgccttctcgacgccgtaggcgttgcgtccgaagtagacggtgttgaggtatccggcaaggatctcgtccttgctcacctcacggttcatcttgacggccagggcgagctcggtgagcttgcggctcatcgtctgcttgctggtgaggtagcggatcttgatgtactgctgggtgatcgtggagcccgattgcaggtccttgccgcgggcgatctggaacagcgaacgcacgatgcccttgggtgagacgcccttgttggaccagaagctgcggtcctcggcggcgacgacggcggccttcacgttgtcggacatcgccgagtagtcgaccatggtgcggttctggatcgcgagctcgccgagcttggtggagccgtcgcggaacagcacggtgctggtctggctgttgaaatcggcgttggggtcgggcagcttgacgcgcgcgtagaagatcagcgagccgagcacgccgacgatcatcagggtggcgagggtgatcgcgatggccgtgaccacgcgcctggcccggctggccttcttcttggtgcggtgcgggccgtgtcgctggctggcgctgggcgccagggcccggcgcggtttgcgcgacttcttccggtcagccatagatgtcctcaactgtctgcttgtgccgtggggcgcggcgtttgcgtccgtctcccagcacatagctggcgatcatgaagttccagccgcagtcggggcacacttcgaccactcgcacggtgaactcaccgaattggtgttccatctcttccagctcagccggctgacggatacgtcctgaatactgcccgagctggtcgccgaacacatagcgcaacaccgccatgcggtcggatgcgcacaccgggcattcgcgtcccgcgggggtgccgtggtggagggccgagctgatcagacgcggatcggcgtcgcaggggtcggcctccatcatgacgcgatcaggccgccgcatcgcctccagggttgcccggcgttgcagcgcatagtcgattcgatggcgctccgtttgcacgggtcaaggttagtcggggcgcctgtggctgccgtcgataccgtattaataggcggattgcggcgacggatcggcgtgacgggcggggcggccgggtggtcatgcgggtgtggccggagggtgtggctggtgggtgggatccgggtgttctgggtgccgctggcgggtgtgacctcgggtgtcctgaacgcggtcggcgggtgtgacctcgggtgtgtcacgtggcgacgggcggatcggtggagcctgcgcgcccgagcccgacggagagcctggttcgggacctgccgggggtgtggcgtggcgtcgatatgcgtgccgactcggcagggcgcccctcgaccgctaaactgttggggcgccgccgttggggtctccggacgccggggtgcgcaacccgtctcggggcattagctcagttggtagagcgatggctttgcaagccataggtcaggggttcgaatcccctatgctccacaatttcagacgtattcgaacccttgacgtgggttttcgggcttgctgtgatggcgaatggttccgcgaggtggagggttgcttcctcgtcttcgtcgatgtcgatgcgggtgatgaaggtctggttggcgaggcgcttcccgtgtgggtcggtgttcttgtagaggcgttggcagtcgatcaggggtcgcagggctttcacaatctgtttgcgggggtcttggttgtgttcgctcttgatgcggcggtcgatgccggcgagacccgcacagatgcagtcttggtggcgtttccgggtggtgaggtcgatggtgctcggcacggtcttccctcctccgctcggcaacaccatcatccccgtgacaccatcgagctcctccgttgtcggtcgaacaaggacgcgcacggtgttctgaccgcctacccaacctcaatctgcaagaggcgtgatgcctcaaaacgaaggttcttaggatctcgcctatctgggtcgtgctctgggttcgtatctggagcagagcaggccgtctgagctgtgctttcaaaaacaggtcggtaagacactgatgtccgtgggcatcagtaccttttactcatgggacattccgccgaagagcttgcaagtgcgctccgccagatcgatcttgctgaggttggacctcaggagccgttgcgagccttcgggacattgcaagaactcgccagcgcccatgccgaagacagcgcagctcgcgaagccctcacagttctatcgaacgtggcagggatgatgctgaagccggatcggtgggagtcgccatatcttccggcaatgcagttcggtaaccgtcgaacctggctgccggaagacctcactgacgtgcaccgcggcttcctctcatactcgtacgcatggcttccctcgggagcacttcgcgcgcaggtgatcgacgtgctgttcgtgagcgcggtggatcgggacgagcgctacaagctggcatcggagtcggtgaacgcctggatcggagtaggactccacggcgaactcaaccgtgcggaggagcaaggctggcgtcgcgcagtcgagatcgctctgcgataccgattcaccgagaaggtcactgcgcttgtggatctagcgatggagacgatccggctggagcagccacgatcggcatggcagatcgcacgggcgctccacgaatctgggacggggcgtgagcacgctgatgagatcgtcgagcggctgaggaacgcgtccgcgacagtggaggatctgggcttccaacgcgagatcctcgaacaggttcgtagttgggcactgaccaaccgcgattcggcagttgtcgccgaggtcgaggaacagatcggtgatctgtggtgggaagaagcgaaacaacggaagtcgtcgtcgcacttcatggcccgagattgtttcggtaatgcctacaacgagtacaagcgagttgagcgaagccgacgatcatcgagaatgaacaagcggcttgcgcgtcttccacgcaagatcagggaggagggggaacttgctctcgaagagatgcacgccgtcgagtccgaccccattgatctgaccatgctgcgggatcaggtggacgaggtactgaaggaggaagatagtcttcgcgcgatggctgcatggtttgcgcgggttccgctcgagtcggttcagcaggctcacgcgactgcgaaacagtcgatgcgcgagaatccactctcgcacctattctcccacaccaccgtcgcagcggatggacgcacagtccagcactctgcgagtgcacgtggacacggagatattccaggcgatgtctggagtgaaatgctgcgccaatgggagttaaaagtgggcatactcgcccagggatacatctggccagcgctggttgagctgagcacgcggcacaagttcaaccatggcgacttcgcactactggtgcgttcctccgcattcattcccccagagcaagagcgccactatgtgaccgcgctccacaacggctactacggacggctgagtgagtcgatcttcatgcttgccccagtcgttgaggcctgtgtgcgcgcgtgcctccagcgggcagggatcgaaaccagaaacatccgagctgatgacacggagatcgagccaggcctgagcgcgctgatggagctcgacggtgtcgacgaagcacttacaccggacttggcatggaacatcagggcgctctactgcggcccgctcggcccgaacctgcgcaatcgggtagctcatgggctgttgtcggaatcggagagcaatggcgccgccgcgctgtttgcgtggtggctcgcactgcgtctggctttcgtgccgttcttcaacggcatgatggcggactctagcgagcctcaaagcgggagcagcacggagagagatccaggagctgggcagactccacctcatgatgattctgaagagtgaagaaagatcccgcccgaacggcgcttctgagctggggtgctgggaaaggacccgtcacttcaccggtagttgtagccagaggaaccgcccgcgccggtcgtctaaacgacgtgcgctgatcccgcaggatcaggtgcggataaagcaccgtctttggtgccttatccgcacctatctttgggtcctcggctgtggcaccgcacgccgggcaggcccgggatggggaggaccttcacgtcgtctaacctgcaaaggtcctccccatctgccggtccacctaggcgtcgcgtgactggcgccgcagctcggtgaagtacaggcgctcgaagaccacgagcacgacgagcaccatcgtcaccgccgccagtcccccaagggcgggcagcctgatgatcgcgggtgcgagccccaccaggatcaccagggcgcaggcacgcgcgacgctcctggcgcgctgcacccgacggtcaaagatgaggtgcccgatgaggtggagcgccacgccacccacgaggcacaggccgtagaacgcaccgagggactcgtccgtgccggccaggcgcagggcaccctccacgccgaccgccgcgaggaggactcccgcaaccaggggaaagtggccgtagacgtaggcctcaaaggcgatgcggatgcgttcagtgcccgccaactcggcaacgcgtcgccccgtggccgccgcgacgagatcgaagtagagccaccacaggcagatcgcgagcacgacccccagtccggcagccagcagcaacgggatcgtgagcggatgctccccggccccgaccccgacggccaccagcgattcacccaggacgatcagcacgaacagctcgaagcgctccgtccaaggggaggcgctgtagatgcgccaactcccgtgccgcgacgtcaggtagaccgacagccactcgcccagcattgcgatggcgaacaatgcggtctcgcgcccgaccgcaccgagtccaacatcggcgcgcagctggttccccaaccagacgaacgtgcaccaggtccaccacagcatcccgaccaggatcaggccgtgcagcaccccctcggcgccgtgctcgtggaagatgaggtcgatgacctgggtgacggcgaacacgtacacaggtcgaagaacagctcgaaggtcgtggccccttcgcccgcgtgtggacgagcctgtcgcagcccccgggcccgggcaggtaatgcaccatccatgcttgaatcccctcatcaataggaacgttcgagcgccggccgcccaatttccaataacaagaataatcagcatcagaaatgccaatcggccaatgaccatcgatgacaaaccggccacttgactcaaggcactcattggttgcacgcgattcatccctgggtagaggatgcgtgcccgccaccgaggccagccccctcgcgcgcgcccgggacaccgacaccgactggcctgtggctacgtgttacaccaccgccccgggcgtcccccatgccaccctgagtgatagcgccggcatccgtgtgccatggcgagaagccgcttccggcaacattcggcgcgcgtccatcccgtcgcataatcgcgccatgaatgacattgtggcgaacctctcagcacagccgatcctcggggtcggcaccgtgctgttcgttattggcctcgggtttgccgtgctcttcggattgtccttccgaattcgggcggtgctcaacaagcgggcgtggaacgggccgacgggacccttcttcatcctcatgttgctgacgctgattccgggcatcgccctcatcgggctccagctctggctgagtcagggccactagccgccgggacgcggacgggtcgcgcaccatccgggtgggcaacccgccccccgcacgcttcagccctcggtcaccgaaccaaggatcaccgacagttcggcgaagccgctggccggatagctggcgtactgcgacgtggccccgcggtcgggtgtgatcgtgcctgttgccgccagcaactcctgggtgagcatgcgcagctccaggcgcgccaacggcgcaccggggcaggcatggatcccggctccgtagagcaggttgtcctcgcgcggacgatcgaggcggaactcattgggatcaccgaacacgtcctcgtcgcggttggctgatgcccacaggatcgtcaagcgctcccccggctcaaactggcgtccgccgatctgggtgggctcagccaccacgcgacggttcgaaatgagcggcggatgaatgcgcaggatctcgtccaccgcatcatcgagcgtggcaggcgagccggccttggcgcgcatcaggctctgcacatcgggatgctcggcaaggtggtcgacgacgatgcccgcggcggccgagatggtgctcagctcgcccaccgtccagttgcgcaggatcgacaccaactcgccgtcattcagcactcggccgtcgacctgctccttcatcaggcgggtggtcaggtcgtccggggcggcgtcgcccatggcgcgtcgctcatcgagcaggccggtgatgtagccgtcgaattgttcagccacggcggcggtggcggcccggtcgccggacgcggtggcccggcggttgctcagcgtccactcacgcaacggttcgcgcaggcgctccggccatcccaggtaggccgactgcacctgcagggcgaagggctcggccaggtcgttgacgatgtcggccggcttgtcgcggggcagcgcggcgatcaggtccgcggcgatcgcccggcaggccggctcgaacgcatccacgacctcctgggtgaagtagcggtcgacgatcgtgcggtacacggtgtgctcgggcgggtccatgccgttgggcaccgcgacgtgcttcgacacgaccgcggagaaggtgcgggtctgggtggcggcgcgcaacacgtcatcgtggcgcaacaacgaccagcccatctgctcgctgtgggccacggggcaccgggcgcgcagcgcgtcgtaggcggcgatctggttgtccagcacctcgggggcgcgaggatcccattcgtacgactgcggttcgtgcggggcggggttgtcgcgagagggagtgtcggaagtcattgccgggcctttcggggtggaggtgaacaggcacaggtcgtatgtcacccgccacgtggggtcgcccagctagcgcgacgggccgggcttccggccacgcgtgctcccatggcgcccccacgtcgcggcgacacatctactggaacgctatagcggcgctggggcagcgtcaacggatggacgacgcccgtcggcggttcagccgaggggaatctccgggcatctggaggctcgaccagcccagaaaagccgctgggtggtcagttgtgcggcaatgacgccgcacaactgaccagcttgggggttccccagccggcgcccgggcgcgacgcttacttgccgctgtacacggggaacttgctgtacttgccgtagtcggtctggtcgagcccacgcagcgtggccatgtcgtcgtccgagatcacgaagtcgacctgcgcattggcgcgcatgtggtcgggattggcgctcttcggcagcggcacggtgcccagctgcagggcgtagcggatcgacagctgcggcacggtgacgtggttgtcctcggcgatgtcgcgcacgcgctcgttgcccatcatctctccgtgggccatgggcgaataggcctccacgaggatgtccttcgacgtgcagtagtccatcagttcctggggcgtattgccgatgtgcaccaacagctggttcacctgcggcgccacccgggccgaggtcaggatgttgtcgatgtcttccttcaggaagttcgagatgccgatcgagcggaccttgccctcatggtgggccttctccagcgcacgccacgcctcacggttgccctcgtcgtagttgccgccgcggaagtcgttccagggctgcggactgtggatcatcatgaggtcgacgtagtcgaggccgagctttgccagcgagccgtcgatcgcggcaaccgcctggtcgaagtccttgatctcggcggccagcttggtggagacgaacagttggtcacgagcgacatcggcggtgcgcacgccctcgccgacgccctgctcattgccgtaggcctgggcggtatcgatattgcggtagccgatctgcacggcatcacgcaccgcctgggctgcccggtcatcgtcgatgaaccatgtgcccaatccgagcttggggatcttctcaccattggacaggtcaaatgtctcgttcaggatcatggctcgcattccttcgtcttggggtttctggctcgttggggcgtatctgggcttgtcaggggctggtcggtcggggaactggcagcgtgccggccgcgacgagtgcgcgcgtcggcagctgctcacgtcgaccggccgggacgtcacggggtgcgcatgctcagcagcatcaaccacgcggccgcgccacatcatccccggtgcgctcactgggcgtgccaatggggcaggaactcaccgtcggccttgcggcagatcactgccgtgccgtcgctggcggtgcccgtggagccctcgtccaggcagatgccgcccaccttcgtggaccccacctggctggtggcctgcgaccaggcgctgccgatcggattgccgccggtgacggtcaccgtcgggccgggcgcggtcgtggtggtggtcaccgggggcgccgtgacggtgttggtcgtcgtggtggtggcggtcaccgtgggcgagggcgacgacgatccgcccaggcccaccgcccccacgacggtgccgacgaccaatgccaagatcacgagcagcacccacacgatgcggcgcccggtcccgttggacccgccgttgccctgcgactccgggccggtgggctcctggtagccggtgcccggatagttcggtgggccgggatagtcggggcccgacggatagccgccccggccggaatagttcccccggtcggaatactgtgcgccgccgtaacccgcacccgcttcgatgcccggcagcaccttggtgggttccgggccgccctgcgaagccgaggccgggtacccctctgacacccggtacccctcggaataggggtcatcgcgatagccgttgcggtaggggtcacccgggtagccagcggcgctgagcgggacggtcggatcggctggccggccattgaccggccccgagaacggacgcgtcggctcatccgagggcaactgcaccgtcggatcagccggataaccattcaccggtcccgaaaacggacgggtcggctcatcggacggcaggttcaccgttggttcgttcggtgcggggatgtacaccgtcggctcggcatcgtcgttcgacggatcccggccccccaccggcgggagctgcatggtgcgctccacgtcggtctcgtcatcgcggcgacgatgacgcggatcgtgatcccgcggcgtcccctgcgtcatcgcgttcccccatgtctcggattgcctgatgcccttcgctgacactgcgcaccgcggcgtagcctccgcccatggcgtccccgacggtgcaggcggatggcaggccgcgagacactgcgcaccgcggcgtagcctccgcccatggcgtggccccctgcatgcggtgcgcaccccaccactctagggacggccgggggagccgcgcctgtggcgagggtctcagggaaccctgaaaaacctgagccgcgcggggcccccgccccactcacccaaccagcagccacacgcagcgatcgggctgcagctggccgtcgatcaccgacccggggctgctctcgagcagcagggcctggtcgcgcgtcccctggtcacccagcacgtggtcacccagcggctggggtgagcgcgacatgttcatcaccacgcgcacctcgccattggtgaagtcgagcacgccggggttggcctcgttccagtgcaccctgccggcacccaggcgatgggtgcgccgcaggtcgatcgccgcgcggtacatctccagcgtcgatccgggatgtccgcgctgctcgttggccgcgtaatcggcgaagctcgccggctggggcagccaactcctgcccgaggggctgaacccgaaggcgggtgcgcccgagtcccacggcaacggcacgcgggcaccatcacgtccgatcacggcaccggcggtgcgcaggaactccgggtcctggcgcacctcgggcgcaaggtcggtgacctccggcaggccgagctcctcgccctggtagaggtaggcgctgccgggcagcgcgagcatgcccagcgtggcggcccgggcgcgcgacagccccagttcgtcgtcgggcttcgggtcgtcggggccgatcccattggtccaggtgggagccggggccccctggtcggacgccggcacggggtatcccaaccgggatgcgtggcgcacgacatcgtggttcgacagcacccacgtggtcgtggcgccgaccgcatcattggcacccaaggcgtcatcgatcgcgtggcgcacagacgccgtgtcccagccggccatcagatagccgaagttgaacgcctgctgcatctcgtcgggacgcacgtacagcgcgcgccgcgtggcatcggccacccaggcctcggccacgagcatgcggtcgccgccgaagccctcgagcacccggtgccagccgcggtagatgtcgtggacacccggctggtcccagcgcggatcgtccaggcgcgacagggcgtcatgctcgccggaggtcacgtcgggcaggccctgttgcttcaccaggccgtgcgccacgtcgacgcggaacccgtcgacgccacggttcaaccagaagcgcaggatgtcctggaactcgtcgatcacctcggggttgtcccagttgaggtcgggctggccggcgtcgaacaggtgcaggtaccactggggatttgccgtgccgtcgtcgacgcgcgtccaggcaggcccaccgaactgcgagggccagttgttgggcggcaactcgccgtgttcaccgcgtccgtcacggaagacatagcggttgcgctcgcgactgccgggcgctgcggccagggccgcggtgaaccacacgtgcttgctgctggtgtggttgggcaccaggtcgatcaccacccgcagtccgcgttggtgcgcgccggccagcagcgcgtcgaagtcatcaagggttccgaacagcggatcgacgtcgcggtagtcggcaacgtcatagccggcgtcggcctgcggtgaggggaagaacgggctcagccacaccgcgtcgacgcccagcgcctccagatcgcccagatgctcgcgcacaccacccaggtcgcccatgccgtcgccgtccgaatcggcgaaagaacgcggatagatctggtagatcactgcgtcgcgccaccacgccttcgtccgatcagccgtgtggcctgcgtgttggtggggcagctgcccgttcgaaccagttgctggggtggacatggtcaagcacacttcctactggacgccggagcaacaacactagccgcagcgccagccgggcttcagggagtgggcgagggcaccgccgcggatgccggggcgccttcgacgggtgacgatggcggcgcggagggctcggtctcctgcccgggcgtgacggtgggtgtgggcgtcggcgactcatcgacgttgagcgtgcccatcactctccactcgccaccctgctctgcgagcacagctgcatagggagtggccgcagagcccggagtgagcacgtcaacgcgcaccacggccgtcttgtcgtcaatcctccgccacgacgaggggtcgggtgagatggtggcatccggcggcaacgccgtaccgggatcaacatcaagatagtgacgcacctgcgccgacacctgcccctcggaaggcgttgacggcgtgttctcgccggcacgcggcgcggggacctgctcgcttcgattgccgccggaacgctccccggtgtccgacgggtcatcacccgcgggctcgagggtaagcaactgctcggcagtcatgccggcggccaccggacgcgattgcgccggacccgcccccacagatccggcaacccaggcagccgaagcggcaacgacggcggccactgcaatgccggcccatacaaaccttgccctgaattttctcatgacagccgcccacatcgtgggatcaggccccgggcaaggaaccctgcgacatcctgcccggcgtgcacggcaccaacgcgggacacgcggtcaccgtgagggttctgtgagcagggacacatggcacacagcttaatccatttttttgggtttatactcttcggccccgcgtcgacggccttcttacggagggccgctgcatccctgccgatgcaactgtgatcagcgggcgacccttccacgaggccggacgcgcccccgagaaccccgcatcacggcgctgacaaggctcgtctcaactcatccttacatggctgagggcccccggccctgactgcccgcccggtaagccgccgtgcacccggcgcgccgtggcgagagaatgactcgtccattcgatccaggagccctgtccatgtcattgaccgccaccgcgccaaccgtgaaagatccggttgaccgggtgccacccatacccaagctcacgattctcggcctgcagcatgtgctggccttctatgccggggcggtgatcgttccgctggtgatcgcccagggcctggggcttgattcggccaccacgattcacctcatcaacgccgacctgttcacctgcggcatcgcctccatcatccagtcggcaggactgggaccgaagatcggggtgcgtatgcccctgctgcagggcgtcaccttcaccgccgtgagtccattgatcgcgatcgggttggcgggtggcggtggggtcggcggcctggccaccatgtacggatcgatcatcgtggccggattagccaccttcttcgtggcacccttcttcgcgaagttgctgcgcttcttcccgcccgtggtcaccggcaccctgctgaccatcatgggcaccacgctgctgtcggtggccgccaacgacatcgtctcgtggggcaccgcagccgccaaggccggcggcagcccggtctcgggcaccatgcgagggctcatctacgcactgggcacgctggccgtgatcgtgctggtgcagtggttgttcaagggcttcatggccaccatctcggtgctcatcggcctggtcgccggcaccatcgtggccgtcttcctgggcgacgccgacttctcgggcgtcggccaggccgctgccttcggcgtcaccacccccttcttcttcggcatgccgaagttctccgtgggcgccatcatctcgatgctcatcgtgatggcgatcaccgccgtggagaccaccggcgatgtcttcgccaccggtgaggtggtgggcaagcgcatcacctcggagcacgtggccaatgcactgcgggccgacggcctggccaccaccttgggcggcgtgctcaactcgttcccctacacctgcttcgcccagaacgtgggcctggtgcgcctcacccgcgtgaagtcgcgctgggtggtcacgatggccggcgccatcatgatcgtgctcggcatcctgcccaaggctggcgccatcgtcgacgcaattcccaccccggtgatcggcggcgcgtcgctggccatgttcgcctcggtggccgtggtcggcatccaaaccctcggcaaggccgacatgcacgacaaccgcaatgcggtgatcgtgtccacctcgatcggcctggccctgctggtgaccctcaagcccgacctggccggcatggtgcccagctggctgtcgatcttcttcggatccggcgtcaccttcggttcgatcgtggcgatcgtgctcaacatcgccttcttccacatcggcccgcatcgcagccccgacgtcgcccgctcgaagaagggccgcaatgtgagcctcgaccaggtgaaccggatgggcaaggacgaattcgtcgacaccttcggtgagctgttcagcggcaccacctggccggtggaaagcgcctgggagctgcgtccgttcaactccaccaccgaactgcgccaggccttcgaggactcggtgctgaccgccgagccctcgtgccagaaggacctggtgcgcggctacttcgacatcgccgacctggtgagcgacgagaacggcgacctgcaggcacagatagacaccggctcggtggcgcttgaccgcatggacgatgtgcagcgccaggaggttcgtgccgcgtcgcacgcctaccgcgaacgattcgacatgccattggtgatcgccgtggagaacctggccagccgcgaacagctcgtgaaggacgcctggcgtcgcgtcgagcattcgcccgagctggaacgccgcatctcggtggcccaggtggtggcgatcgccgacaaccgcttcaccaagctggtggccgacgccaacccgatccgcaatgcgtggagccgcaagttcgagcagctggacgaatagcccacgcacgcagcaaggacaggggcggatggagcactgtcttcggtgctttatccgcccctgtcgtcgtcatggggggacgtccgcgggtcggaccgctcagttcagctcgtcgagggacacctgcaacttgtcgagcgtttcgcggtcgatgaggtcgggggactgctgggccacctgcgcggggctgaccagcaaagacagttcaccgtcctgcacagccagggtgagggccggggcagcggcggccatcacgtgcacggctcgctcgtcggccaccaggttgcgcaacggcatgtgcaccccgaggcggcgtcgcagcagcagggtgtcgtagccgggctggctgccggccagttcgacgtccacgaacaccgtgtgcaggaagcgcaccgaatcggcgaaccattcggcggcgccgggctccacattgtgggcctgtccgcccgagctggcaggcctggccagcgacagcccgtggccgcccaacaggtagacgtgcgactcgaagggcaccaggtgtgagtcgagctcggcgatgaggtcgagggtgttgcgcaccggcaccatcgggtcgccgcaggtggcgaagacgaagatcggcggggtgtcgggcgtgatggcgcccaccaggtcggggatgcgctggcccagcggacgccccatctgcgccatcgtcaccgggtagccgagcaccagcgcatcgggggcctcctcggcaatcgtgcccagcgcgagcgccaggtggccgccggccgagaagcccgcacaggcgatgcggtgcgggttgatgccgaactcctcggcacccgagcggatgcgcagcagggcggcggtggcgtcggcaaggctcgcctcgaaggggacgtcggcacccaccgcatagcgcagcacgaacgcattgaagccctccgccaggtaggcggtggccaccggctcggcctctcgttcggcgatctcgagataggcgccgccgggcagcacgagcaccgcggggcgtggcggcatcgtcgggtccaccgcatgggtggtgggggcgtcgtcgaggaggtaactggtgagggtcgcggtgtcgctgaggctctcggtggtcacgcgcattttcgctccttgttcaacagccggggggttcgtcgtacccgtcattctcacaaccggtgatcctgcgggggcccgtggtggtgaatgcgcttgccagcgttcatccctccggtgcgcgcccccggcccgacggcgggcggatcagcagcccaccggcagaactttaccgggatttcgccgccagcagagctggcggatcaccgctgtgtgagcgtcgcaggaggttccgcggcggaggtccatgccacgagtgcaaccccaccgtgcgcccttcgcggacgatggacagctgctcgtcgaaacctacgttcgcgtaacttggatgtcgggaccgccacctgtggcgaccaccccgatgatgacgacaacacgacgcaaaccaggccatgctgcccgcccggcccgccgcgacccagcgggccgggcgggcgatgagcgccgggacgcctcccggcagcggctggccaaggagatccccatgaacgaaagcctcgacgcactgcaacccaccatgttccgcgaggtgttcgagcaccacttcacctgggcgtccggattcgagcgcaatatccaccgctatgccgatcgccctgccatgaccgacctgcccagcgggcgccactggacctacgccgagctgggacgcgacaccggccggctggtcgcggggctcgcggcgcgcggcgtcggcaagggcgacctggtggcctaccagctgtacaactgccccgagttcgcgatgctctacattgccgcccagggcctgcgcgcggtgagctcgccgtccaacttccggttggcggccggcgagctcgcccacgtgttcgaccagacccggcccaaggtgttcgtctacgacgtgaggctggccgatcaggtggcccacgcgctggaactggccgacttcaacccgcagacgttggccggcgtcggctccggtgagctgctgcccggcgcgatccgcttcgacgaactgctcgctgacgaggcgcccagcttccacgcccccgacgacgcgtccacctgggactggaccagcctgttgttcacctcgggcaccaccggcatgccgaagccggtgccgctgaccagcctcaacgaagtgctcaccgcccacgacgtgatcatgcacttcccgctgaatgcccacgaatcgacgctcaatatgtcaccgtggttccaccgcggcggcaactactgcgccggacccaacacgatgttctacctgggcggcgaggtggtgatcatgccgaagttcgacgcggacgcggtgctcgacaccatcgccgagcgcggactcgcctatgtggtcggcgcccccacgaacctcgagcgactggccgacgcccaggaacgcaggccgcgcgacctcagctcgctgtcgggcatcgtcaccatgggcgccccactggagagggccgccgccctgcgctaccagcgcgtgctcagcccccgcatcgccaacgggtacggcaccaccgagggcttctggaacacctacctgcgtccctacgacctgccggagggctccggcaccgccgggcatgcctgcctcgacgacgatgtggcggtggtcaggctgttcgacgaccgcaccgccgcccccgatgagttggccgccaaggacaacaaggaggtgggtgaggtggtgatgcgcactccgaaggccggttacgcgtacctcggtcacgacgccgaagcggctgagaagttccgcgacggctggatctatcccggcgacctggccacctgggacgagaccgagacactgaccatcgtcggacgcaaggacgacatggtgatctcgggcggcgagaacgtgcatcccgtgcaggtggaggagatcctggacgccgacgatcaggtggtcgacagcctggtcacgggcctgcccgacaaggaatggggccaggtcgtggtggcctatgtggtgcccgagcccggtgccttcaccgaccaccagcaggccgcgcgccacctcgaccggctgtgccgtgacgccgccaccctggccaactacaagcgtccgcgcctgtatgccttcgttgacgcattgccgatgactgccaccggcaagaagcagcactacaagatgcacgagcgcaccaccgccgacgccgcgaagggattgttcgtgcgtccgtgaattcgccgggacgcacatccattcatatgaccatgattcacgcaccgatggcccgccgattgatcgacgccgcaaacgggcagccgctgtccctccgcgacgccgtggggcacctggggaagatcatggcgatccgggtgccgtcaccgtattcgggcgatcctgaccatgtcgtgtcatcgccggtgagcgtggcccaggttgacgaggtgatcgcccccttcacgcagtgggcacacgcccggttccgggcacacagccagcgcgagatgcacttcgagcccggaggcgacgcagggccgggagggtggcctccgcgccctgacccattgcaattcgataatgccgacgagttggggatttggtggtccaccccctggttccgcccgctgcccgggcatgcatctggtgggcaacaccgtggccacaccacaacgggccctttcctcgacgcgccctgcgtcgaggcctatctcatggaggacgccccttttcctccccgtggttggcgcccggcgcaccgggggatcacgccaacttcgcgaagctgtccgtgcgcccctacccctatgagcccgacgatccagtcatctgcgagatcgccgaacccgaggactgggcagaactggtgaaccgccatcccctggtgcgaaagcgcgacccagatttctgggagtactggctcggggcccagcggcagggaagccggcgacaccgaacacccttcgtgctcgtcaactgggcggatgtcgccaaggaatacgacgcggtccatgtcactccccgggggtacctcctcagtgcatgggcgcccattgccaccgaatacgggctgacgaccctggcggggtgggggcccgacctgacacctgttggttgcgctgaaccaatcccaccacgagtcgggcaatagagcagtcccgcccaccgatcacgtgatcggtgggcgggactgctgcgtcacatcagctcaggtcatcgggcacatgtcccgatgggcgtgctcagatgcgtccggcgatatcggcacccacttcggcatcgatcttcgtccaatattcgacgatgcggctgcgcactggctccaccacgtcggtattcacgatttggtcgacgatcgtattcaccaattgggcccggtcctcttcgctgaacacgtcacgcaccagcgcatgggcctggccgaagtcgtcgtcctgcgaatgcagcgtggctgcggcgcgcaccaggtcaccatcggactcccacgagtcctcggcgcggccgccaccctcggcccacggacgtcccgccgagttgggcgcatagaccggcgctgcccccgagtgctcgaagcgcatgtggccgtcgaaggtgtacgcgttggtcgggatgaccgggcggttcaccggcagctgctcgaagttcgccccgatgcggttgcgcgccgcatcgttgtaggcgaacacgcggcccatgagcatcttgtcgggcgagatgccggtgcccggcacgtagttcgacggtgagaaggcggcctgctcgatctcggcgaagaagttgtcgggattgcggtcgagcgtgaaccgacccacatcgatcagcgggtagtcgccgtgcggccacaccttcgtgaggtcgaacggattgaaccggtactcgcgggcatcgtcgtagggcatcacctgcaccttgacgtcccagctggggaaatcaccgtcggcgatggcgtcgaacaggtcctgacgatggaagtcggcattatcgccggcgatctcagcagcctccgcagccgtcatgttccgcacgccctgcgcgctgatgaagtggtacttcacccagaacaattcgccgccagcattgatccatgaataggtatgcgacgaatagccgttcatttcacgccaggtggccggaaggccacgcggccccatcagatatgccacctggtgggcagattcgggcgacagcgtccagaagtcccactgcatattggggctgcgcaggccagaatcaggaagccgcttctgcgaccgaatgaaatgcgggaacttcatcggatcgcgcatgaagaacaccggcgtgttgttgccgaccatgtcgaagtttccctgctgggtgtagaacttcaacgcgaagccgcgcacatcgcgccaggtgtcgggcgatccctgctcgccggccacggcgctgaaccgggccagcatcggggtgctgcggcccggctgcaggaagtcggccttcgtataggcggtgacgtcgccggtgacggtgaaggtgccgaaggcgccggagccctttgcatgggggctgcgctcgggcacgcgttcacggttgaaatgggccagagtctcaaccagatgcacatcatgcagtgcaatggggccgtccgcaccgacagtgagcgagtgctcctcgctcgccgccggggcaccgttctcctgggtggggctggctttcggatcgataggcatgggtctccttgcgactcggtgcttcgatggctcgttgccattgcccccattcttgccgacagcctgtcgcgatcaggtggtggggccgaagaatcgccgcagtttcactcctcggataaatctggacggtaggggtccagctgctccaccgagggcaggtagtagtagccgccggtctcaggatggctgtagaaggtgagcgcgtcgcgcaggccgtcgacgccggccatctggtcgagcatcttctgcatcacgtccgagccggcaccgatgccgacgaacatcgtgccgtgggcgctggcggtaccgaaggcggtgttgcgacgcaggatgtcacccaggtcatcctgatcggtgcgggcaatgtgcgagctcgggggcttcgggtcaaattcggcgtcggtctccttggtgcgtccgatgaccctttcctggtcggccaccggaagggactcccaggcctgcacgtcatggggccagcgctgcagcagcagcacactgccacctgcggcggggccgtcgggcacctgcacgacgcccggcagctgcgacaggtgcgggttctcggtgccgtcgacgaagccggtgaggtcgcggtggtggtgatagacccaaccctcggtttcgtcggccagcgtggcccacgtcgacacggcgttgatgagcgtgcggctcaggtcgaacaccgcgtcctgcgcgccgccctgcacccagatcgccacatcatgctgagtggcgggcatcgtgaagtcatcgagaccgcgcagcgggcggttgaagcccgccaggccgggcagcacgtgctcgggcaccagcttggcccacatctcgggtcggaagccgaccacggccatgctgccggcgccggtcaccaggctctcatcgagcgcgccgacgactcccctgagcacctcagttgaggcgtccacggtgaggtcgaactcgagataggcgtgatgggtggtgccgaaggccaggattccgggctgtggcgctccgatgggtgcagattcagtgggcatgcacccatcctagaaaagacgcggcccccgcgctgcggcgcaagtccgtggagcgaccacatcggccgggcgggcaacgcgacagccggggccggcgagcaccgtcacccgttgtggggcggtgccacttgctgcggaggttctttgcgcatctgggctaccttgccggaacccataagcagggggtgcttctccacgagaaatgcccctcgctagggtgttcccaggatcaccaacctgtgcacgcaatcgcccgcggacacatcctcgacgatccctgaacccccggcatgaaggtttggctcgactttcgcgccgggacgatggttctggggcgatgacctgaaaggtcgatcggcgctgatcaaccaagggagaggcggatcatcacggtccgcctctcccgtaaggcctcatccgcatccctccacggggccgtgccccaacgcgtggtgtcgcagactcccgagaatcgtgtgcacacggccacgggcgcgccgggccacctccgtcggagtaggggttaccgaagcgcaggcagtggaaccgcctgcgccaatccgacccgctggccgcctgtgcatcccagcgctgctttgatggcaaggtgtccaccatgcccgcacccctcctggaactgctcgtcctggcgctgctggcggtggcgatggcgcaggtggcaaagcgcatcatcgccggagtgagcttcgggcgccgtttcgtggcgtcgctgctggtgttcctgctgacactgccggccggcacctgggtcgtggagcagacccgcgtcgtggggcccgacgacaccctgcaggtgaactggttcgtcttcctcctggtaatggtgctgtgtttcgtgtgggtattcgctgccgccctcactgcgctggtggcgctcgaactggtgctgcccagcggatcattgccgtcgccgatccagtcggtgcgcgacatccgaatggcgttgagacgtcaccgccgctacctgcagctcggttggatcgcgatgagctccgggttgtggaaggcgctgcgcaagggtcccgattcgcccggtttcggggaggccctggtgaagatgctcaaccgctcgggcgtcaccttcatcaagctcggccaggtgctgtcaacccgtcccgatgtgctgcctggcgccgtgatgaccgccctcacctcgttgtgggacaccgcggcacctgcgcccgaaaagaacatccgcaccatgctgcgcagccaatggggccgcgatcccgaggaggtgctcggcagcttcgacgacactcccttcgccgcagcgtcaattgcccaggtgcaccgcgccaccctgaaggacggcacggcggtggtgatcaaggtgcaacgtcccggcgcggccgagcaggtggtggttgactccgacatcctgctgcgcttcacccggcttgccgagcagcgcttcgcgtgggcacgcgcgatgggcgtcgacgccctgggacgcggcatgaccgcggccctcaaggaagagctcgactatcggcgcgaggcgcgcaatacgaaggcgatcgcggccaccctggccgacaacccggcgaacaccacgccagtggtgaaccaggaattgacgcgcgagaaagtgctcgtgatgagtccggtgaacggctcgtcgttggcctcgaaggtggacacgctcgacgacgacacccgccgcgagctggcgcgcaccctgatggccgccgcgctgcagggaatcctggtgcacggcatcttccatgccgacttgcatcccggcaacatcctgttgctcgacgatggacgcatcggcctgctggacttcggctcggtgggcgtcatcgatgctgagacccgccagttggttgccgccctgctggtggccttcgtggccgacgacaactctgccgccaccaccgccgtgacggccgcctttgacgtggacgacaccgtggatcgcatggcgctgcagcgcgatctcggccgcgcgctgacgctgctggcgcacaccggcgacgaatcgaccgccaccttcaacgagttcttcaccgtgatgcgcgactaccgcatcaccattcccggtgatgtggcgggcgcattccgcacgctcacctcactggagggcaccctcaccgcgctgacgcccggctacggcctgttggccggcgccgaagacgccatgccgtcgatcgtcgccaagttggctgcgcccaagcagctggccatgatcactgcctccaccgcgatgacctcggcgttgctggcgcgtcgcctccctgcacgcaccgaacagatcaccgacatgctggcgcggggccagtacacgctgaacacccggatgttgtcggatgactccgaccgggagtggctgcgttcccgccttgacgacgcgatgtcgtcgctgttcgcggccgtggccgtggcactcgcggtggtgttcatcgtgatccccggtggcccggccatcacgtctgccctgaccggatacgacctggccggcgcggccatcggttgtgtcgggctcgtgctcatcctgcgcctgatggtgcggctgttcacccggcactcggggcgtccctgatcattgcggcggacgtcggcgctgcgccccttctgggcccgggtcagcgcagatccagaagattggggcggataaagcactgtctacggtgctttatccgccccaatctttgcgtccgatcacgtgaggcggacgccgggcgcccatccttggccggggccgtggtgccggggccggcacttccaccaccaactgggcacttgtgtaactgggcacttgtgcggcaatgacgccgcaccactgcccacccaacggagtttcgggcccggacagcgactgccggaactagttggtcttgccggacgcttccggtccgttgtcgggcacctgggggatgtcggggcgggtgtcgccgtcatcggatgcctcgtcggcccggggagcagcatcggtctggggagcagctccgccctgcgatgtcggaacgatcggctcggtcggctgatcggccgcgccctgcgcagccgcactgtggccggtggcgtcctgcgcggacgcctgaccagcgccgtcctgacccgcactgtcctgacccggcgcgaatccctgcgttgcgccataggcggtgccggcgtcgaagcgctggccctgggtggtcgcatacttggcggcaccgggcgcggcctggccgtcaccgaaggcgccggtgccatagggcgccgcgtcggccggcggctgcgcgggagcgggtgccggcgcaggggccgcgggggcctgggcctgttgcggctgggtggcgtaggtgcccggaatctgctgcccgtagggcgccaccgcagtgggcagctggccgccgtagtactcaatggcgagcttgttgccctcggggcgtccccacacaaaccagcagatcatgccgatcaggcccgacggcaacgccgccagcgcccacagcgccttcatgccgggcgtccagttccttgaggtgacgatgctcaccagcgtgataacccacaggattgccgggatcgccaggatgaggaggaagacaccgacggaaatgccgtcgaggaagttcgtgtccaagggagtcagcatgcaagtgacattactggcatgcccgcgcctcggggcgccgactcccggatcactggttgccgaagtgcatattcagccggcaatcaggcatctgccgagctcgggccgcgccgacgcagacgccgcgccagacgcggaagcaacaggtacagcgcccaggtgagtcccacgccccaggccaccgcgctgctcgtgaacaggcccgagccggtgagttccagggcgaacatcgccgagaacatgggggagtgttgggtgagcgtcagcacgcaggcggcgcccgccaccgccaccgtcacgcccaccgcggcgtccacatggcaccagcccatcagcgccatcgtgagggacgcgcccaccgccagcgacggcgtcagcacgccaccgttcgacccggcgccgaagctcagcagggtggcgccgaacttggcgacgcaggcgatcagcagggcgccgggcagcagaccacccgtcagcacggtctgcacgagcacctggccgttgccggggatctggggattccacaggccgatggccgccaccgccacggccccgatcggcaccgtccaccacagccgccgggtgtcgggctcgtgggccttgatccaggccagcgcccgctggaaggcgaagcccaccaccagcgccacgacagcgatcagcgccgcccaggcgtaggcgtgcacatcgacgcgcacctgcggcatcacataggtgcgcgcccgatggttgaacagccacgacaccgcggtcgacagtgcggagatgatgacggcaaccgccacctgccaccagccacgacgggtgcgcaggttgggccgcaccacctcctcgagtgcgtacagggcgccagcaagcggcacgttgtacaccgaggccaggccggctcctgcggtggcggcgatcaacaggccgcgggtggccacgtccacgcggaagcgccgggccagggcctgggcggcgacggccgcgtactggcggggtgccggctcgcgtccctgtgagatgccggtgccgacgatgagcatctgggcgaaggcgtcgagcaccgtggccagcggcggcaggcgcttggtgccggtggggtcggtggaggcgcccttgacccccacgaggtttccgcccggacgtggccggatgcgcatccagatgagcccgcaggccactccgccgagcagggccaccagcaggcgacgccaccatggggcgccggccggtccgttgggtgatttcgtgaagtcgaagccgaatgtcagggtctcgatgagtcggttcgcctcggcggtgagtccaccgatcactcccgccaccacgccggccacgacgatgagcaccaccatcgtgggccaccgtgtgcggtcggttcggcctgtcgactctccgttcatcgggttgcgggtccgccacaacggtgcccgtcacggctgtgttcatgccgcccgtgcccgtggccacagtgcgcatgacaacagtcggcagcgcgccagcggggatcatcgcacccgatgatggatccgggctgatcagcgcttgcgaggcgacgcatcggaccccctgtcgggacgggcgcggcgatcaccacgcgacggttccgcccggcacctcgtgccggacaccatcattgtgccgccgcaggggatttcctgctgaccaggggtgcgcgaaaagttgctccctcgaatgggggtcccttcttagaaatcgaccgccgcggatggtcggtggtcgagggccggggcaattcacacctcgatggcgaggaccagctcccgggcgtctgagcggtcggcgcccgcgccgccgggcacgccgtgggtcgggcggcgtgtgtgtgcccggggacaccggcggcgatccaggcagtgacctcccacagttccggtccgggcatgcctctggtctgtttggtgcgtctactccgatcgctgtggcacccacgcgccactgatcgccctccacaatcaccaccgtcgatgtacacgccatgattcccgtgtcctcgcagacacaccaccggacctgccgaggcaggccgctgtgctcagagctcctcgtgtcgctcacgaacagcgaccagaaacctgaagacatgggacacgccgtttgcatgacacggctcgcggctgtgtgcatcgtccggacgaaataaactgagcgcatgacggcgcttggctcggcccattcctgtccccggtgcggtgcgccggttccggtctatgtcggtcgcggtcgcaggaggcggtgaccatgtcgacgcgcgacgactacgccgggctgagcgacacggtgctctacgacgtgttctacgaggccgggaccatggtcggcggagctcttgtggcgtcctggcggcgcgctgaggcggccggcgaccaggtggctgcgcagcagttccgggatgagcatttttccgttaaccatgaacgcaacgcggtggcggcccgggatcgtgagggccagatcgcgtggatccttcggtgggaggcccgccgtgaggagcttcggcgggccgccgacggcgatgacacccggcccgccagtcactgactgaatcccccgcaaacagcgctgaggggcgctccaagaccagctgacgggcgccctgaagctctcatctcgcgttgtaaccacatattgatacgacacaacaagaccgcgggccaccgccgttctgtcatgccggagcacgctctgcccggtgaaataatgatggcaaaccaccggtgactcaaccggagggcccggacaaccatgcccctatttcgatgaagaggaagaaaccagtagtagcccacaggagttttcgaggaagcctcacgcgtctttcatagaagacctagcaatcttgaggcactggatgggaaaatactcccaaaaacctattgcgccaacaaacctgctgacaatggtctacgagtaaagacaatccgaagtagtcccttgcgggaacgacgccgttgcgcggaacgttatcgtcgcgcaggggtcaggatgcttctgctttcgccaccgatataggtggccgtcgtgcgggccgccgggtcagtggcagcagcaggcgccgccgtcgtcgcaggtcttcacggtgcgtccgtcagcggtgacgacgaccttcttcttgggccagaagtgcgacaccgcaccgagcgccgcgccggtgccgatcgccagcacgatggccgattgcacgtcggttgcgaaccagccgatgccgaagacgacgatgcatgcggcggcgatgatcaccagacgctgccagctggtctgcttgttcataaggcaaccctaagttctcggccggcgaacgtccaccccgtccacgcgcgaggaccatccagcggtcactttggacgcattcccagccgcatctgcacgatttcccgactgccgaaggcctcacccccggaactgggcccctagccagctgggcaactgagcagcacgcgccggactctcaacgcccccacgcatcccacccgggaaacaccgtgaccaacgaccgctagttgcccatcggcgaaaggccctggggcgtgtccacgggtgtcgctgtcctgttcggagaggggcgcttgagactggagagaatcgccacgacgcatgcgaagagccccagcagtgggatctgcgaccaagcggtcatgcctcctcggagcagccctccgctgccccagatgaggaacagcaccacgatgcagaagcccttgatccacgaccctgcactttccgaaccagaggcataccggacaagcaataccaatcctgcacagacaagtaacaatgctgccaccagtgcaaggatgagcggccccgaccacgatgccttcatatcaaccaggtcggcgacgatcgaccagaacatgaaagccatgaaggcaatcatgagaccacacacccgctttgtcctcgtgtccataatgttctttccctcttcatcatcccttgtggaacagttgtccccatgtcgttgaattacatgcactaaaccgtgcagtgtgccccagccgcgtcggacagcgcaggggctggacagccgggggtggacccgaagacccgccccccgactgtcgcgcggcgatcaggtgagcgaggccgcagcgatcttgttgatcgacgcctcgagcttgccgtcgaagtcctctgggctgtcgtccaccgacaggccctccgacagggcacgcgagaagctggcgatcaggccatggttgcgggcgaggcgctcgcaggcctcgtcgcgactgaatccgcccgacagcgcgacgacgcgcagcacccgcgggtcggcgatcaggtcggcgtacagatcgtccttcaccgggatcgagaccttgaacatcacctgctggccctcggccaggccgtccaggtggctggccagctggtcatgcagcacctgctcgctggcctcgcgatcggtggcggtgatgtcggcctccggctcgaggatcggcaccaggccctttgccaggatctgcgcgccaagctcgaactgctggtcgacaatcgccttgattccctgcgcgtcgtgatgggcgatcaccgagcgcatcttggtgccgaagatgcccttggccacggcacggtcaagcagcttgtccaagtcgggaatcggcttcatgagcttgacgccatgagcttcctcgccaaggcccttgtcaaccttgaggaacggcacgatgcgcttgcgctcccacaggaactgcgcggtcggcacgtcatccacggtgttgtccatggtgcgctcgaagaggatcgcggcgaggatgtgctcctcggtgaacgaggggctggtgatgatgcgcgtgcgcatctggtgcaccagcttgaacatctcgtcgtcattgtcgtaggcatcatcggggatgccataggcacgcaacgccttcggggtggagccgcccgactggtccagtgccgcgacgaatccccggccggtggccatccggtccttctgatcctgattcatggtgacctccattggttgcgccgaccccggcgtggggtcgacgccatgtatccctgttgggcactatccctggggcattcacccctgtggggcatccattccccggcgagcacgtgtccgcatgggacgcatgtccgtcggggtatgcattgacgcatgtccgtcgggggtaggcctgtgagggatatgcccttctgattccgatcctagtaagcagaagtgcccgcggtgggatgcccgaagaaccgccgtgatccgttgtgcacgtgaccagcacgcacccccagaacagagcgactccccccgccatatggcggggggagtcgcttcagtcatgcgcgctggtcacctcgaccgcgcggcacggcgttgctcagcaggatcaggccttcttgatggccgaaatctcgaactcaagcttgaccttctcgctcaccagcacgccgccggcttccagggcggcattccaggtgaggccccagtccttgcggttgacatcgaggctgccctcgaagccgatgcgatggttgccgaaaggatcggtggcggcaccggtgaactcgaacacaatggtgaccggcttggtgacgtccttgatggtcaggtcgccggtgatctccacatgcgagttatcgatgagcttcacggccgtcgacttgaaggtgatcgtcgggtacttctcgatctcgaagaagtcggcggtgcgcaggtgctcgtcgcgctgcttgctgcgggtgtcgacgctgtcgacgttgatggtcacctcaacgctgctcgccgacgggttggcgccgtcgaggtgggcctcgccgctgaaatcggtgaaactgccacgcaccttggtgatcatggcgtgacgagccacgaagccgagcgtggtgtgcgatgcgtcgatggtgtagtcgccggacagggacgtgagatcggtgctcatatgtactcctaggggttgctggattgactgtgcccgttgactgctgggtgccgaccgggcggagtggcgactggccgcacactccaagactgttgagttttcaactatatcatagccaaccacatcccggcgggtgatattcccggaccgtgagatccaccgggaccagatcccgcgacgattcccgccggacgtcccgtgccgagtccctcgccggagtcgtccggcacgctcggaagggcctgccgccgaaccccctggagcgctgcggcgaaccgtccagcgacccgcccgggcaaccagcgccgatcacgcggaaatcattcgccctgaacgaacccggccgatggcacccgccgccgccgtctagggttggatcatggaacacacagctgtgttatcgggcgaaggcgccaaggccgagctgcccatcgtcgaatcaagcgtcggctcagacggttatgacatccggaacctgctccgcaccaccggcaatgtcacctacgacatgggcttcgcgaataccgcgagctgccaatcggccatcacctacatcgacggtgagaagggcgtcctgcgctaccgcggctacccgatcgagcagctggccgacaagtcgacattcctggaaaccgcctatctggtgatctatggtgagctgccccgcccggcggagctggccgacttcgaggagcgcatcaagcgcaagaccatcatcgacgaaggcatgcgcaagttcttcgagaccttcccccgcggctcccaccccatgccggtgctggccgccggcgttcaggcgctgggcaccttcagcaccaccagcatcggtgacgatccccagtcaatcgagaaggcgaccgaacgactgatcgccaaaatgccgacgctggccgcctacggctacaagaattcacgaggcgagcccttcttgtatcccgacaatgccctcagctacgtacagaactttgagcggatgagcttcggctatcccaccgagccctaccatttcgagcccgagatcacccgcgcgctcgacgtcctgctgatcctgcacgccgatcatgagcagaactgttccagctccaccgtgcgcctggtgggcagctcgggggccaacatctatgcgtcgatctcggccggaatcaacgcactgtcgggacccctgcacggcggcgccaaccaggcagtgctcgagatgctcgaggccatcaaggcatcaggcatcagcgtcaaggaatacgtgcagcaggtgaaggatcgcaacgccggcatcaagctgatgggcttcggccaccgcatctacaagaactacgacccgcgcgcggccatcatcaagcagcacgccgatcgggtgctcgccctcaaatcggggcgccgcgacctactcgacatcgcccaggaactggagcaggcggcgctggctgacgactacttcaccgagcgcaagctctatccgaacgtcgacttctattcgggcctcatctatgaggcgatgggctttcccaaggagatgttcacggtgttgttcgcgatcgggcgcctgcccggctggatcgcccagtggcgcgagcagcgtgccgacccgaactcaaggatcgggcgtccgcgtcaggtgtacaccggggtacccgagcgcgactatgtgcccatggacgatcggtagatcgtccggtcccgaaagagtcgcacgatcggtagatcgtccggtcctgagaaaaatgcacgatcgctagatcgtccacaccgtagaactgcacgatcgctagatcgtccatctcgcacctgagaagggacgccaccccaccgggcggcgtcccttcagcttgtgctggcccacggccccggatcaccgccccggacacccgtcgcgcgagccgcgcagggcgatggcagactggaaacatgttgaccgatggtgtgagttatcagcctgatccgaagcgctacgacggccggatgatctaccgccgggtggggcattggggcctacaacttcccgcaatctcgctgggactgtggaagaacttcggtgacgcccagcccttcgagacccaacgggccgtggtgcgggctgccttcgatgccggtgtgacgcacttcgacctcgccaacaactacggcccgccctatgggcaggccgagatcaacttcggcacgctgctgcgcaccgacctggcgccctaccgcgatgagctggtgatcagcaccaaggccggctacgacatgtggcccggcccctacggccagggcggcggaagccgcaagtacattcgcgcctcgctcgaccagtcgctggcccgcctggggctcgactacgtcgacatcttctattcgcaccgcttcgaccccgagacccccctcgaggagacgatgatggcgctcgatagggccgtgcgcagcggcaaggccctgtatgcggccatctcgaactatccggccgccgaaaccgcgcaggcagcccagatcgcccgcgaactcggcactccgctgctgatccaccaggcccgctattccatcttcaaccggtgggtcgagggcggcggcgatggcgccgcccgtgaatcgctgctcgaccgggccgaggcggagggcatgggcgtgatggccttcagcccgctgcagcagggtctgctcacctcgcgctacctccagggcgtgcccgacgattcacgcgcccgccacagctccgacttccgccagagctggctcgacgaggacacgctcgcccaggtgcgggcgctcaacgacatcgccgccgcgcgcggccagagcctggcccagatggcactggcatggctgctgcgcgacgagcgcgtctcgtcggtggtgatcggggcgtccagcgtcaagcagctcaccaacagcctgggcgcgctcaagaacctgtacttcaccgccgaggagcttgccgccatcgacgcacacggcgcgcgtcccggccacgagctgtggagcgactgagttccttggccatgaggctcccggccgcaggaccctgtcacccgaaccgaagcgccgcccgatgaccgcccgcaaggcacgtgcacgaacggctgccgcccggcgccggcggcgtcccacaccgcgcaaggcgcagggtccggtgcggcgcaagctgggcgattcactgcatatgcgcttgtggatcagcattgccgtgggcgtggcagtgggcgtcggcaccctgtggatggggcacagccccggctcgttgatgctcggctgggtggtcgccgccaccctgttcaccgtgtccacctggtacttggtgttccgcatgagcgacgatgacacccgcgaccatgcccaggagaacaatcccagcgcgggcgtctccgacaccctgctgatgagtgcctgcatggccagcatcgtggggctcgccctgctgatgttcggggccaagagcaaggggcagctggtccccgactccatcatcggggtgctgggcatcctggcgtcatggtctgccatccacacgctgttcacgctgcgctacgcctacgtctacttccgcgatggcggcaccggcatcaacttcaacggtgacgaccgcccctgctacatcgacttcgcctacctggccttcaccatcggcatgacctaccaggtgtcggacaccaacctgggcaccaaggaactgcgacgcattgcgctgcaccatgcgttgatctcctatttgttcggcaccgtggtggtcgcctcgatgatcaacatgttcgtgcaggtggccgccggcggctgagcgtatgccacagcctccggcgcccgctcaaggtttttgccccggaccgaaggaaccacggccagacttcacgtcagccagcattgagtacccgctgacagcgaaaacggccacgaaatatacgaccatgatgatgttgaatggcagtcttccgatgattccaagtaggtgaagaacgaacaccacgagaccaatagcagtaaacgccaggagcagccgattcttggtcatgtctccccccttctattgtgcggcgcagtagacgacgatccccgaggtctgggtgaacactatccctgtgccggcgctggcacagccccgcaacttcccgacatcccacgacaagattcgaattccggcgtgactgccgatgcctgagtcaacggcttttcgtgatgttaacatgcgaatcgccgatatggacgccattctcatcaccactgagaaggatccgaatctcgccaatccgccaaagggtttcggcaggtcgaactatgaatcggccttgtgtaacccgtcacgacgcaatgaatcctcaatgacctttctgtggacaaagagggggcgtccgtggatcgactccacggacgccccctgcatcttctgcaataccgggttcggcgctactgcgtcgccggattcacgcccttgccatgcgaagcagccggatcgtgggccgagtcggacacgagcacattgtgcgtgcgctccaacgaggttccctcgacgtcgacattgggcaggatgcggtcaagccacttcggcagccaccaggccgtcttgcccatgaggtgcatcagcgccggcatgatgaacagccgcacgccgaaggcgtcgaagagcacgccgaaggccaggccgaagccgagcggacgaatcacattcattggcgagaagatgaagcctgcgaacaccgagatcatgatgatcgcggcggcacgcacaaccggggcggccatgcgcaaaccgctcttcacggccacccgcgcctcgactccgtgctcataggcctcgcgcataccgctcaccaggaacagctgatagtccatggccaggccgaacagcacaccgatgataatcgtgggtgcgaagctcagcagcgggcttggatcatgcacgccgaacaccgagcccaaccaaccccattgatagacggccgtggtggcccccaacgcggcgaacagggacaacacgaacccgccggtggccacgataggcaccaggatcgagcggaagaccaccatgagaatgaccagcgacaggccgaccaccacgatgagataggaaggtagcgcatcggccagtttctgagagacgtcgatactcatcgacgtctgacccgccacacccagagtggttccgtctgacgtaggtgacagatcgcgcagatcgtgcaccagttgctcggtggacttgtcggtcggcccgctgttggggatcacctggaaggcgatcaccgtgcgcgagtccgaaaccgccgccggcaccaccgcagcaacatcgttctgggcagccagctgctgtccgatctttgcctccacgatctgctcttcgtcggtcgacatggcctgtggcaaggtggccaccaccatgagcgggccgttgacaccggcgccgaacttctcatcggtcgtcttgtagttcttgtattgcaccgaatcggtcggttcctgggcgccggttggcatgcccagctgcatggacgtcgcgggcagcgcaatcaccacgagtacggcggtggcgatcaccgcacgaagcaccgcattacgggtgcgcatcggccggatcacgggggctgcctgttcgggggtgccgatgctcttgcgtgacttcttgttgagcgcatggttacccatcaggctcagcaacgccggggtgaaggtgatggccaccagcacggcaaccagcacagcgaccgcggcgacatcgcccatcacgcgcaggaaggggatgccggtgatgttgagcgccagcaaggcgatgaacacggtggaaccggcgaagacaacggcgttgccggcggtgcccaccgccagaccgatcgactcgcgcttgtccatgccggccagcagctgcttgcgatgccggttgaggatgaacagcgaatagtcgatgcccaccgccaggccgatcatcaggcccagcatcggggtgacgttcatcatggtgaccttgcccgacagggccagcgcgccggtcacggctacacccacgcccaccagcgagctgatcagcggcgtaatggcaggcaggatcgcccgcatcatgaacaccagcaccacgagtgcgaccgcaacgccgaccacctccatgccgcccaggccgccgatgtcaaaggccaggccgttggaataggtggtctgcacaccggggatcgaggtgtcgtcgatcacgtcgcggatggcctgtttctggctcgaatccatctccactgcttccttctccagcgagacggtggcgaaggcgctgctgccgtcctgcgagacggtgcgcagattctgtgacatctcgatcagggacttggcggcagtggccttttcctgctgcgtcgacagctgattggcgctgtcgtccagtttggacttctgggcgtccaactgagcctgctgcgcctggaactgggccgccatcgcgtcatagacaccggccgccttggcttggtcctcggcggcggtcaatttctgctgagccgcatcgaactgggtgcgtccagcgtccagctgctgctgggcagtttgcagctgagtctcagcggcggcaagttgctgagcctgcgccgcacgctggtcggcggtctggaacgggttgaccgtgccggtaaccccctcggccttgtccacccgaccgagtaactctgcgatctgcgtcttctgggcgtcggagaagcttcccgagtcggaggtgaagacgatccgctcgctgccgcccgacgcctgtggcagcgcctgcttcatcgagtcggcaacctgctgggtctcggtgttgggaatggagaatgaggtgctcagggtgccgtggaacgcggcataggcgccaccggctgcggccagcacgattagccagcagatgatcaccgcccaggcccggtgtgcggcccctcggcccaaccggtacaacaacttcgccatcggatgtccttccgtttctcacatgtggcggccccacccgcacgcccccgcagggacgcggcgaactggagccacctggtcgttcgtggttggcacatcgtcgggccgtgagccacgatacacaacgagtgttgcataaacaacatctgtcgcatatcctgtgaaggtcgtcgcagatcgcccgtcggtgggcggtcatcgggggagggcaccatggacgcacgcatcgtcaggacgcggcacgcgctgcagggcgccctgctggaattggcgcgcgacaggccgctcgacgacatcacggtgggcgacatcaccaagcgcgcccacgtgaaccgctcgagcttctacctgcactacaccgacaaggacacgctgctggccgacgcactggagatgcagattgacaggtcggccgacgacgaggacctgcgcaccgactcacccgagcacatgccgccggggctgacggactacctcaaccacgtggcggaatatgcctcgctgtacggccgggtgctcaacgacggcgggtcgggcgtggtggccaaccggctgcgcagccacgtgcacgacatcgtcgagcgcgccctgaacgactcggacgccgatcccttccccaacctgccgcgcgacatcgccgcagccggggtcgccggcctggcagtgggcatcatcaccgcctggctcgggcgcgacccgatgccaccggtacacaccgccgccacctggatctgggacatgctcgtgccggtcgccggcgtggccggacgtccgtcggatgctgcgtcgtcctccaacgacgggtccgggcccaatcctgcggccccctcgggcggcgactccggatacctcgcgctggggctgcgccgaacaaccgggaaatcatcgatcccgggctagctactgtggatacagccaagtagacaaccggggtcatctctccgaaggagaacaaccatggagaagaagacaaccaccaagaacgtcaccgtcctgggcgcccacgggcagatcgcccgcatcgtcatcgaacggctgctggccgaaaccgacgaccacctcaccctgttcctgcgcgacgccgcgcgcctgggcagcgtcgacgccgcccgcgagaccgtggtggacggcgacgccaccagcaccgacgacctggcgaaggcggtgcggggcgcagacatcgtctacgccaacctcgccgggaagatcgaggccgaggccgacgccgtcgtggcagccatgcgggcagccggcgtcaagcgcctcatctggatctccaccttgggcatctacgacgaggttcccggcgccttcggcgcatggaaccacaagatgctcgacggcggatacctgcagccctatgcgcgcgccgccgccaccatcgaggcgtccggactcgactacacgatcattcgtcccgcctggttgcaggacgaacccaccgtcgactacgagaccacccagaagggcgagcccttcaagggcaccgaggtgtcgcgtgcttcggtggccgacgtcgtggtgcacctgatcaaccagcccgaccgtgggatcggccattcggtgggcgtcgacaagccgggcaccgatggcgacaagccctcgttctactgagcagcaccccttcccgcaccgcttcacccccacattgcgacccccgcgccgcaacaccccaccccaggagtcagacatgtcccatcatcgccaggcacacgccacacacgacgcgtcatcgcgcacccgcaggcacccggtgcgcaccgccgcccgatggcctggccggagcgctggcattcaccggtgtgggccacctgagctttgcccgcgagggcttcgccgtcgcggtgcccgattggatgccgggcagcaaggacgccacggtgctcgcctcgggcgtggtcgagctggcgcttgccgccgcgcttgcctccggcgtccagcgcaagcaggtgggacgcgccacggccgccttcttcgcggccgtgttcccgggcaatgtgcaccaatatgtgaagcacctcgacgcatcattcctcaacagtgaccagcgacgcctggtacgcctgtacttccagcccctgctcgtggcgtgggcgctggaggcgacgcgcgaggactgagcgcaccgccacccggcagtcatgcccggcgggcgatgctcactccaccgccctgcggacgatctcggcggcctgcgccggcgtcaccccgccgcgccactggttgtcgggatagctgaccaccaccggggcttggttgcacgggaacaggcacagggtgcgggtgatcaacacctcgtcgtgcaccacgcccagctccttggcggtgcgcaccatcgactccaccacctcgcggctgccctgcgcgttgcagcgcacgccgcagcacaccagcaggtgacgccggaacggcgggggagcctgccacgccgggctgtgcagcggggcctcgtcgccactgatcgggtcccagcgggtaccggacgcggagccatcccggggggattccccgggcgcggacgccacagccactggcccgcgcagcggaccggcatctggcggctcaacgccatcgtgacgctcatggcgcacctgcagcaccacggcgggcgcgccatcgcggcgggtgcgcagccagtgtccggctacccgacgcagccacgacaccgacgtggcaccaccgccgggctggcaaccgatcaggcggatgcccaccccggacgaaccgagcggcgcgcgcccactcgtcgaggcccgcccctcgggcccggcccccggggacgcgtccacgcccgccaattcatcgagcacctcgaccagcggcgtgccatcaccctccaggctggccgacgccaagcccggcagctccgcggcccaggcctgcaccgccgcgttgctcgtggcgttcatcgacaccagcaccacctgccaaccccgctcctcagccgccatcgctgaccaacccctgccatgagaacctgagtcgatcggtgcggctcacctgtccacgcaccgcgaagcgctcggccaccagctgggcggtcagcacctcgtcggtaggaccctgcgccaccaggtggccgtcgtcgagcacgatgaggcggtcggcgaaggctgccgccaggtcgaggtcgtgcagcaccaccagcgtggtcagccgcagcgaggtgacgatgcgcaacagggcgatctgatggtgcaggtcgaggtggttcgtcggctcgtcaagcatcagcacctgcggctcctgggccagggcgcgtgccagctgcacccgctggcgttccccacctgacaaggtgttccacgacctgtcggccagcccggccacacccgtgcgcgccatcgcctcgtccacgcgggcaccatggccgttcagctgccagcgcccctcgtgggggatgcggcccagcgccaccacgtcgcgcacggtgagcgccacgcgggcctgcggcagctgttccatgagcgccatcgtgcgggcgatctcgcggcgcgacatgtcggtgaggcgacgatcgtccaccagcacctgaccccgactgggcttgcgcagcccacacagcagttgcagcagggtggtctttccggagccgttcatgcccaccagcgcggtgcagcagccctcggccacctcggtggtgatgtcgcggacgatccaccggtcgtccacctgccagcccaggccacggcatgccaggcgcgtcattgcgacgcctgcctgcgcaacagcacggccaacacgggagttcccagcagcgcggtgatcacgcccaccggaatctcggtgttgcccgtgatcgaccgtgccgcggtgtcggaccacaagagcagcagggccccacccagggcggtgagcggcaacagcccggcgtgcctggggcccaccagcaggcgcatgatgtggggcacggtgagccccacgaagccgatcgggcccacgaaggccaccgtcatggcggtggtcagggcggtgaagatcatcaacccccagcgcacccgggtgacgttgatgcccaatgaggccgccgaggtgtcgccgaagctgaaggcgtccagggtgcgcgaatagcccatcgcccccaccagcgtgaccagcgcgacgcccgccagcacgcccgcagccaaccaccgcgcaccggcgaacgagccgagcatccactccatcgccgtgcgggccgcggtggtgcccccgaacaccatgatcaacagggaggtgatggcggcgcacacctgcgccaccgccacgccggccagcacggtgcgggccggcggcagctcaccgccgcgtccggtcgccagcacgagcaccaacagcatcgccagcacggcacccacgaaggcagcgcccatcatgagcaccgactgcgacaggcccaccgacaggccgatcaccagcacgaagaccgccccgacgctggcgccgctcgagatgcccagcagataggggtcggccagcgcattgccggtgagcgtctgcaggatcgccccgcacacggccagcacggcaccggaggcgatggacgccagcacgcgcggcaggcgcagctgccagacgatctggtcagccagcggcgtgacgtcggcgccggtgatcagccgcaggcgtcgcgcgatcacgcccaccacctcgccgggcgacagcggcaccgatccgatgcccagcgccatcacgacactcaccgccagcgcgaccaccaggacgcccagccacagccagtgcgcggtccgggcgcgcccagcgtggtcccggcttccggcatcggcgctgccgccggcatcagcccgggcgtgcgccgcggtccgcgtcatggacgcatcacctgggcagtgcggcgagctggtccgagacggacttggcgccgtccaccagcgtggcgcccggcgtggtctgcgagaacggcacggtgatgaagcgcttgttctgcacggccttgaggttcttcagcgccggatcgttggagatgtagtcgatcttcgactgggcggtggaccatgacgcgtcggccagcacgatcacatcgggatcggcggccacgaccttctcccagggcacattggcccaggccccgtccacgtcggcgaacgcgttggtggcaccgaccgcctgcatcaccagcgccggaccgccggcattgccgccggtgaacggggtgtcggtctgcgaatcccaccagaacaccttctggccgtcgccggccttcgcctgcttgacggcgtccagctcggtcttctgcgcgtcgatcaccgtggtggcattgccgggctggccgaacagcttggcgatgtcgcccagcgacgaccacacattgtcgaagctcacctgggcgcggtcggccttgttgtcacaggcgaaggggtctaggtaggtggggatgccctgctgctcgagttcgtcgcgggtgcccaccgccttgtcgctgaaggcgctggcatacgacgccagggcgaagtcgggcttggcctgggcgaagacctccttggtggggtacttgtcggccagcaccgggatcgacgcgtaggcgtccttgtacttgtcggccaccttgtcgtcgaggtaggcggtgcctgccatctgcttctgcacgcccagcgcgagcgcctcctcgatggcgccctggttgagtgccaccgcgcgcgtcggctgctgcttcacggtgacggtgcgcccgcagttgttcaccgacaccgggaaggcaccaccggtggcgcttgccgacgagcttcccgagccgggcgcgccggcgcatccggtggcggcgatggccaggccgaggcccagggccaccaggcgggagcgggccggcacgcggcgggcgacgttcgggcgcggggaattgggacgtgaatacgcggacattgcgaaaccttcctgaggggcccttcgcggggccaaccgtgacaagagcgttgggcttggtcttcggactcggcgtcatccgcggcaggcgccttcccggggatctgccccagtgacctgatgcctgctgcgtcggcctcaccgctgcgcgacagtcccggtttcccaccggattcccacacatctgtgatgcgacccaacgggcagacagtctagggctccggacgcggtcgggtgcgatcccggacccctctgcctgccacccgggaccccttttcgccgaccggcccacgaccagggcgccaccgcaccggtgatcctcagccaacacacagtcttgacgctccgcacgggttcccgactggggcacactggtatcaggtccacggccgccggtgggcccggaaggatgcccatgattccgctggaggtcagcgtcaagttccctgagaccgtcatcgagatcgtcgtcaccctcgtgctggcgctggtctgccgctttgcgctgcgcaaggtgatcgatcgcacggtggcgcgcgccacccaacgccagggcgagcacggcctgctggcgatgggacgttcctcgagcgtggtcgccaccaccggcggggtgaacaccaaccgctccatgcagcgggccaagacgctgggttcggtgctgaagtcgatgaccgacgtggtgttgatcatcgtcgtggtgctcatggtgctgaactcactgaacatcaacatcggacccgccctggcaagcgccggcatcgtcggcgtcgcggtcggcttcggggcgcaaagcctgttcaaggacctgttcagtggcgtattcatgcttgccgaggaccagtacggcgtcggcgacatcatcgaggtgaacaagctcaagggcaccgtgcgatcggtgggcttccgcgtcaccgagttgcaggacttcaatggcgaggtctggtacgtgcgcaacggcgagatcagcacggtgggcaatgtgagccagggcttcacgtcgagcctggtgaccattccggtgagcgtcgacgagagccccaagctggtgatccggctgctggcgcgcatgttgaagaagatggactccgagcccgattggcacaacaagatgctggaggagcccagcatgctgggcctgtccgccctggacgccaccaccgccagctaccagatctcgatcaagtgcccggccaattcgcagtgggacgtcgagcgcgagatccgcagccgcgcgttgtcgacgctgagccaggccggcgtgcggatgccggtgacgcgggtggccacggtgccgccgcacaccgccgacgagaccatggccatgccccattcccgcaggcgccgcctgggccagttggcgcagcagcgcatggccgaacggcacgccaccgaccagtcggccacgggacggacgggcaccgaaccagccggggaggccacgcaggagccgtcggccgagcagggcacgccccccaccggcgaggtgatccggcgtcccgccgagccgggacaggccgccgccgacagccggccgaccgacgcagcccaggccgcagcgggtccggcatccgatcaggtggtgccggctgacgacaccctgcccgccccgaaggtgaaggccgccgacaccggccagctgcgcaaggcccgcgcctggctcgaccacggcgccgaccgctcggtgcgctgggtggcgcaggccactcccggggccagcgaggtgcacgacatgaccgccgaccagacggtgctgatgagcgccgatgatgtgctgcgtcggcccgatcaggccgacggcaccggccggacgcaccgcagcaccgcggcatcgggcacgacggcatcaggcactgccgcatcagatactgcggcatcgggctcgggcaccgacggtgcgaagcccacgggcgacaggcccggcgccgaccccagtgacccccgcaccggtgccgccgactccggcgccaccaagtccactgcggccggctcctccgatgcgaagggcgacgacgaggccagcaagacccgcagcctgcgggcgatcgacaccgggcaccagcccggcaccgacccggagcagggcaccggcgatccggccccgcagtccggcgaccgatccgacccgtccgagccgccggccgaccagacacggcgcctgttcgggcgtcgcggccgcaagcgcgactgagcgaccgacctcgcccccaccaccgggccggcaccgccactaaactcgtgactcgtgtccgattcttcgcaggccctgtctgttgcccagcgtcacgcggtggatgagctgttgcgcatcacaccggtgatcgacgagctgggcgcgctgttccacaaagccggcgaggagctctacctggtgggcggttcggtgcgcgacgccctgttgggccgcctgggccacgacctcgacttcaccacctcggccgatcccgacaccaccgagcggttgctgcaccggttcagctccgcggtatggaccgtcggcaaggagttcggcaccatcggggcgtccaagaagtcgaacggccacgagctgcagatcgagatcaccaccttccgcgccgacgcctacgagcccgattcacgcaagccgatcgtggcctacggcgacaacgtgcaggacgacctggtgcgccgcgacttcacggtgaacgcgatggccatcgacgtgcattccaaggcgttcgtcgacccccacggcggcatccgggacctcgccgcgaaggtgctgcgcaccccgacggcccccgagatcagcttcagcgacgatccgctgcgcatgatgcgggcctgccggttcgccgcccagctggggttcaaggttgacccggtcaccttcaatgcgatgaaggccatgcacgagcgcatcgagatcgtctcgcccgagcgagtgcgcgacgaattgtcgaagctgctgctggccgacgcgccgcgcccgggcctcaacctgttggtggccagcggactggccgacatcgtgctgcccgaactgcccgcaatgcgcctggaacgcgacgagcacttccgccacaaggacgtctacgagcactcactgacggtgctcgatcaggcgatcgcgctggagaaggcccgcgactacaaggacggcaagcccaacccccaccaccagcccgacctggtgatccgcctggcggcgctgctgcacgacatcggcaagccggccacccgggggctggacggcgacaaggtcaccttccaccaccacgacatcgtgggcgccaagctggcgcgcaagcggctgcgtgcactgcactatcccaaggccgtggtggacgcggtgggccagctcatcgaacagcacctgcgctttcatggctatggcgaggcgagctggaccgattcggcggtgcgccgctatgtgcgcgacgccggcgaccagctggagcacctgcacatcctcacccgcagcgactgcaccacccgcaatgcccgcaaggccgacaccctgcgccgcgcctacgacgagctcgaggcccgcatcgacgagctggccgccaccgaggagttgaagtcgatccgtcccgacctgaacggcgacgagatcatgacgatcctgggcatcgcgccgggtccgcaggtgggccgggcctaccagcacatgctgtcggtgcgcatggaccagggtcccctcgaccatgacgccgccgtcgccgaactgaagcgctggtgggccgcgcagccccaccccgacgccggctgaggcaccgcccggatcgcgcgccaatccacgcgcggcgcttgcccacaggcaggggcgactagactaggtgagttggtttcgtccacccccggtccccccgacagcctgcgctgcctgaacgagctggtcaccgctcaccgtggaatcggtgggagacgccgaccaccacgcgacaaattctcgggcacgacgctcgacacgagagattttcgggtacccactcgagtggccatctcgcgccgaaaacgcccccggcgtcctggtgcatcacaaccggcgcatgaacacccgcgtggacgaaccacatgcgtgaacgaaacaggcacgaccgaaacaagcgcgcatcaggcgaagctgccacccccgaccatcggtggcgcttcgccttgactatgcgtgctgcgggaatgacaagcagagaagttgaggaactcagtggatttcaggaacgagcggcaccttattcacgtgccgggcaccgatcgggtgttcaaccgactcaaggtactgatcgtactgatgatcccgctggcgatgtcactgatgtcgatcagctcgatcaacgtggcactgcccaccatcgaaacctccatcggcgcctccgacacgtccgtgcaatggatgctgtcgggctacgccctggtgttcggcatgctgctggtgccctcggggcgcctcggcgacgcgatcggacgcggcaccgtgtggatcaccggcgtgtcgatcttctcgatcggctcgctggtctgtggcttcgcgagcaccccggggctgctcaacatcgcccgcgtggcgcagggcttcggtgccggcgtgctcaatccccagaccatcggcatgatccagcagtacttccgcggtgagggccgggcgcgcgcctacagcgtcttcggcctggtgatcgccgcatcggtggccgccggcccgctgttcaccggcctgatcatccgtgcgctgggcgcccagaacggctggcgcgccagcttcctgtggaacgccccgctcggtttcctgggcatcgcactggccctcatgtggttccccttcgacggggagcgccggcgtcgccacgccaaggaggccggcgaggcggtgcacaccaagctcgacctcgacccggtggcgatggtgttgctggccgccgccgtgctgtgcatcatgatgccgttcatgctcaagaccggcccgggcttcctgctgctgccggtcgctgccgtgctgctggtggtgtgggtgcgctgggagcgccactacggcgcccgcggcggtcagccgatggttgacctgaagctgttccgctaccgctcgttcacccatgccaccgccgtgtcgggcacgcagttcctgggtggcacgtcgatcttcgtgctcgtggcgctgttcctgcaggacggcatgcatgtctcggccctgcaggcgggcatgatcggcctgccgaatgcggtgttgtcggccatcgcgtccctgtggtgtggacgccaggccctcacccgcggacgcaacctggtgatcgtcggcctgtcgtgcatcctggtgggcgtgctgggttccatcggcatggccaagctgatcatggagcacggggtcaacttctggtggcttgccgtgccgctgtcgctgatcggcatcggcaacggctgcatgaccggctgcaaccagaccctgtcgatgctcgaggtgcccccgaaggagggcggcgtcgccggcggcgtgaagtcgaccaccgagcgcgtggccaccgccatcggcaatgcggtgatcaccgccgtgttcttcaccctggtcaccaagggctgggccgtggcgctcacctgggcctatgtggtgatcgccgtgatcatcgccgtcgccatcggactggcgatctacgaccgcgtcaccctgggccgtggcgcgccgcccaccgcacactccgtgacggtctgaggccgtcgcgggacgacgggactgcgggcctgccgcgcaggtgtcgtccgtcaccgggcacgtcatcaacagggtcgggcgtcaacaggccccggcatcaacaggccccgtcgtcaacaggcagggcatcgacaggcacaggcaatacgatgggcgggtgagcccacgacatgccgacgacgcctccggtgaccgccggcgcaccggcccgcaggcccggctgccgcgctggctggccgggctgttgtgcatcgtgctcaccacgctgtcgctgggcgtcgtgcatcccgccgtgcgcgccgacgacgcgacactggacgtcaccttcacctcgatgtcgccgtcggcggtcaccgacgagggcgacctcacgctcaccggcaccatcaccaacaagggctcggccacggtgaaccgtcccaccgtgcacatgtggcgcaatcgggcgccactgaccaacgccgacgcgctcaacttcctggtgaagaaccagtcgtccgagccgatgggcgatgtggtcaccacctcggccgccgcacagacggtggccagcctgacgccgggggcgagcgccaacttcacggtgcgcgccgccttctcgggcggtggcgacccgttggccctggtgagcccgggcaacgcctacctggtgggcgtgcgcgtcgacaacagtgcgggcacccaggtgggcagctcacgcaccctcatctcctatcccggcacctcgaagtacgacgccacgacggtggccgagctggccagcgcgcccagctatgtgggcaccgacaacggcaagcccgtgttcaccgacgaccacctggccgccgagatctcccccgacggacgcctgggccagctcgtgcaactcgccgaggccgacaacgtcagctcggtgatcgaccccctgctcgtcgatgagctcacggcgatggcctcgggctacgaggtgcgcagcaccgacggcacacgggttcccggccggggacaggacgccgccacctccttcctgcggcgcatccagggcgtcgcggcgaacggacgcagctaccgcggcctgtacgggatgttgggcgtcagcgcggcagcgtcggcgtcccgccatgacctgctggtgtcggcagcgcagcagtcggcgggcaaccagaccctcaaggcgctgccgctggcaatcaccgccaccggcaatgcgctcaccagcaatgaccttgaatacctggccagcgccaagccgacgctcgtgttggcgcagggcatcgacccggcgtcgccggtgcgccaggcaacggtgcggcagggtgcacccacccagctcacggtggtgtcggtgcagaccacgctgggtgacggcggccccgcgccggcccccgatcaggacctggtgcaccgggtgggacgcctgcagagcgagcagctggtgcgggccggtgcctacggcacgtcggtgcacctggtgaccggtggcgacgctgcacgcgccgaacttgccgccgccatcgggcgggtgcgcgtgccgctgcaggaactgctgaagaagcagaccacgccggtggcgctgcagaccggcaacaccgacgagatcagcgccccgggcagcctcaccggggccgagtcgacggcccagacgcagttgggcttctacaaggccctgaccggtgaggacgccggcatcgacacggagttgttgatcacgcgggtgtggagcggcagctttgccgacgcggacgccgccgaggcctacctgaacacggcgatggccaccgtcagcgccgccctgcagtccgggggcgtggaggtgcacatgagcgagaagctcatcgtgccctcgaagtccacgtcgttgccgatcagcctgaccaattcgatgtcgatccccgtgcgggtgcgggtgcacttcgactccgacaactcctcgcgcatcgacatcgacgacaccgatgtgatccggctcgacccgggtgaatccgcgacggtgcgcatcaccccgcatgccagcgggtcgggcaccgtgcagatggacgccatggtgatgaccgccggcgaccaggcccaccagctgggcgattcggtgcgcttcaccgtgcaggccaacaatgtgggcaacatcgggtggatcatcatcattgcctcgggcgtggtgttgctgggggccaccgcgctgcgggtgcgccaggtgcgccacgagcgcgcccagcagcacacgcctgccgacgacgaccccgacgtgcccttcgacccgagccccctcgatgactgatcaccgcggtgctgcccttcaccggatggcgcctggccaccccatcggccactaagtggacagttgtgacccggcagcggtggaatcagggcggcgtcaactcgatcggtccttaggtggagggtttcgatgcgtctagtcatcacaaccatccactgagtggcccgacgtcgcctggcacggaaatctcgttgggtggtcacctgtgccgcgtcattgccgcacaactgcccactcagggggagcgtcgaccccagtgcgcaccgacccggagacgccccaaccccccaccccaagatgggcgattccccgcagcatcggcacgcccacgtgccccgcgcccgcgggcgagggcagactagagccgatacgcccacgcaggggacaaccagtcgtcggagcggaggccagcgagggggatgatgagcgccgagagccagccggagctgcccggcgcacgtccctatccgcgcaatctcatcgcgggcgaccttgtggccaatcgctaccagctggagacccagctcaaccagtgggacgcaggcgtcacctggcgggcgatcgaccgcaccctgtcgcgccgcgtggtggtgcacctgttcaacccccactcgcccgagacggcccgcgccctggaggccgcccgacgcgcggccgtggcggtggactcccggttcgtgcgcgtcctcgacgccatggacggcgaccagcccttcatcgtcaccgaattcgccaccggcatcacgttgcgctcgctgctcgcccatggcccagtgacggccctcgaatcggcccatatcgtgcgcgagcttgccgacgccctggcccccatgcacgccgagggcctgttccatcgtcgcctcaatcccgacaccgtggtggtcacccgcaccggcaatgtgaagatcatgggcttcctgctcgaggcggccctggccggcgccacgatctcatcgtccgacaactgggcgcgccaggaagccgaggacgtccgggcgctcggcaagatcctgtatgcctgcctggtggcgcgctggccgatcgacccgtccctggcccagaccagccagtggggattgcctgccgccccgatgagcgaacccggccccgacggaccgcactgggcaccgccgtccagcgtcgacccacgcgttccgcccacggtcaacgccatctgcatccagtccttcgacccccgccccgattcggtgccactgcgcaccgccgacgagatcgtcatcgcgctgggccgcgtgctcggcaccgcggaggccgacgaggtgctgggacgacgcatccgcgccctgcccgccgacgaggccggcgagaacgcccacatcggcctgcatgcccccggcatcgacgagctcccgcagcgcgccgcgactcccgacgacgacggaccggccacccaacgcatggcccccgtcacgggccacgacgatccgaactggcccggcggcgacgaccccaactggcccttcggggccgacgacagctctccactgggcacgaccgataccggcacgcgcacccccctgaccggagcccaggccgcggcagcgggctcagcagcgccgcggccgccggcgccggtggggacggtccagaccttcatcaccgccttgcccgagcccgaagacggcggtgccccccaccccgaccgccgagattctgaccgcggggatctcgaccacaggcattcagacctccgggatttcgatcccgaccgcaccgatccgcggttgcggcgcctgcggcaatccgacgccgacgccttcgacgatgacgacgatcccgatgacgacctcaccatcgacgtcagcggcaagctggtgggcccactgcccgaccgcgacgccgaaccccgccgtcttgccactcatgcgcgcgcctatcgactggcgcgctggctgattccgctgggcgtggtgctgatgctggtgatcgcgctcaccggcatggtgcgctcctgtcaggccaccagtgccgcgaaggccgcccaggcgaaggtggttgccccggcctcggtggtcgagttcgatcccaccgccgatggtggcgaggccgccgagtcgcccggcgaggtggccttggccaccgacggcgacccatccactgcctggcacacccaggaatacggcggcagcgcggcgttcggcggagtcaagcccggcagcggcctgctgctcgacctcggccgggcccacgagctgtcgtcggtgaccctgacgttgatcggagcgcccaccggcgtccaactgctcgtgccccacgacgacgcgaatccctcaatgtccacggtgaaggactggaccgtggccagccgtgccgatgccgccggccagagcgtcacgttgacgcccgacaaggccaccagcatccgccacctggtggtctacctcacctcgctgccgcagctcaccaatgggcgctaccagggcgcgattgccgagatctcggtgaattcctgagcccgtcaccgcagcgttggcgccccgtcaccccacagttggccgttcgtggtgcgcccctgagacaatggcccgatgaagctgcttctcattcgtcatggccagtccgcaaacaacgcactcagcggagcaaaccacccggtgagcagccaatatcccgatcccacgttgaccgacttgggccgtcagcaggccgagacgctggcgcatgccttcaccgacgggctgctgccacgtcccagcgtgttgctcagctccccgatgacccgcgccgtgcagacggccgcgccgcttgccgacgagctcgacatgccgatcgagttggagacgcaggcccacgaggtgggtggcatcttccagagcgtgcagggcgagcccggtagcttccagggggcgtcgcgcgcggagctggctgacatcagtgaccggctgatcttcaacgaggacatccacgacgagggttggtatcgcctcggatcgcatgtggagaccccggccgaggggcagggacgcggcaagcgcctgtaccgttcgattctggagcgctacggcaaccaggacggcgtggtcgcgctggtctgccacgagtggatcaccaactacgtgctgcgtgccgcgctcggcctgtccgatcccgagggcgagcccgatccgtggttctcactgccgaacacctcgagcaccttcatccagaccggccttccgttgcccggcccctatgagggtggcggcaccgcgatgatctggtgggtcggccgcttcgaccaccttccggacgagcaagtgagccgctgacaagggatgatgcccgcaaggcccgcgacactccatgagtctcgggataggtatcggggaccccggcttccctacacgagttcctgattcccgcgggccacgcccatcgggggttggggccgcaggcctcaggcgccacggctcagcgagtccgagaccaccttcgccaggttgcccacggtcatgtccgacgactgctgcccacggatcgccgccatcagctggccctcgatcaccggctccagatcgagccaggccgggcagccgcccagcgaggcggtggcgtacctcacattcgccagcccggcgctcatcacgcggttgccggccagctgcgacccggcgatcacgtcggagcgcgggggcaccgccggcagcatgctcaccgccgacaacagcggctgggactgcagggcgtactggcagaactggaaggccacttccttgaactgcgactggcggctgacggccagctgggtgccggtctgcagcaccacggggtccttggacgcctggtcggggggcagcgggaagaagcccaggtggccctcgtcgtccaggtgtgagcgccgcagcgccggccacagggtcgacgacatcggcgacatggccgtcttctgctggatgaacaggggctgggcgccatcggtggggatcttcgccgggtcggccgtgccgtccttgaccaggccgatgatgtagtcgagcgccttcaccccggtgccgtcgttgaacgccaggccgcccttgggcgtgaacagcgagccgccgtagctgcccaccagcatcgcccacaggtgcaccacgcccgccccgaagacgtcgaagccaccatggtcgggggcattgagctgcttggccatctcgcgcagctcgtcgagcgtgcgcggaggggcgctgatgccggcgtcggccagcacatcggtgcggtagccgatcacggtcaggtcgagtgcatagggcagcgcgaacagcttgtcgccccaatagcacccggtcatcaggcgttggtccaggttgaggccgtcggtgatgtcggcaggcatctcggccagcgcattctgccgttccagcacgggcacccagccctggccgggcatgagcacatcggccagcttgccggcagccagtgaggtgatcaccttgtcgggcagcttgtccaggctcgtataggtggccgcaagcgaatagccggtgccggcgaagaagccggtgagcatgttgttggcgtaggagtcctggctcgcctggtcctggtagagcgccgacagcatgttgagccgtccgctgccgtggctcttggcgtcctgccaggtgggcgtcggcgacggcgtacaggccgacgacagggtcgagctggaactgctcttcccgccacaggcgctcagcgttgccgcagcggcggccgcaccggcccaggccagcagtccccgtcgctgtaggcgcacgacgcccccctcattcgatgatcagtggccggttcgcgggtgtcccacgcgtggcctcggcaggccgatgccatggcgacgccggcccgcgtcacgactttatccggcccgcggcatcggcgctccccgctggcgtccgtgtcgatggcgcaccgggtggcggacggcgcaggcccacagcgacggcgcggcatgccggtgcatcgctaccgctctgcggggcggtccagcgcggcggggcagggtcgggaattgtggcgcccgcaatagagttgaggaaggtgtggtccctccacgtgggggtgcggggcatgaccgccgggtgtgcacccgggcgcgatgccgtaccctacagattgtggtgcgccacgtttcattcaactagagcttgtggttttgctcaaggagaaggggaagcatgaacgacgagattcgcgatgtcatcatcgtgggttcaggcccggccggctacacggccgcgatctacaccggacgcgccggcatgcgaccgattgtgctcgagggttcggtcaccgcaggcggtgcgttgatgaccaccaccgaggtggagaactaccccggattccctgacggcgtgctgggtcccgtgctgatgagcgatatgcgcgcccaggccgagaagttcgacgccgagttgatcgccgatgacgccaccaagatcgaactgggcggcgacatcaagaaggtcaccgactccgagggcaatgtgtaccgcgcccgcgcggtcatcctggccatgggctcggcctatcgtcatctcaacctgcccgaggaggaggagttctccggacgcggcgtcagctggtgcgccacctgtgacgggttcttcttccgcggcaaggagattgccgtggtcggtggtggcgattccgccatcgaggaggcaaccttcctgacccgcttcgcggacaaggtgacgctgatccatcgtcgcgacgcattccgcgccagcaacatcatggccaagcgcgccctggacaacccgaagatcgagatcgcctggaactccgaggtggtgggcatgagtggcgacggcacgctcaacgcactgcgcctgcgcgacacgcagaccggcgaggagcgtgagctggcggtggccggcctgttcgaggccatcggcaatgtgccgcgctccgagctcgtcaagggtcaggtggagctcaatcccgacggctatgtgaaggttgccggcgactcgacgctcaccgacgcacccggcgtcttcgcctgtggcgacctggtcgaccatgtgtaccagcaggccatcacggctgccggcaccggttgccgcgccgcactggacgccgagcactacctgagcgccctgatggacgagaacagcgatcaggcgacggaggcacttgccaacgcctgacctccctgcggaccaacccggccccggacggccggagtatccgctccacaagccataacggccctgcggtccactccgtacacggggtggatccgcgggacccgtgcgacggccccgaggggccacagacaacggctcccaaccgggccaccagacaacaacaaggggtaaccatggcacagcccaaggacgtcactgacgccacattttccgacgaggtgctcaaggccgacaagcccaccgtcgttgactactgggcggattggtgcgggccctgcaagcagctcagcccgattctcgaccaactcgccgaggagtacggcgacaagatcaacttcgtgaaggtcgacgccgacgcgaacaccaaggtcgccaccgaccaggggatcctgggcctgccgaccgtgcagatctaccagaacggcgaagtggtcaagcagttccagggcggcaagcccaagagcgtgatcgtcaagatgctgcaggagttcgtgtgatgtccggcgagcagacgaagacctcccgggtgggtgtgaacctgaagcgcgtgagccccgtgcactacgaggtcaccaatggcaggggatccaccatcagcgtgggacatggcgatgacgtgttcagccccgtcgagctgctgttggcagccgtcggtgcctgctcgtcgatcgacgtcgacgtggtcaccacgcgacgtgccgacccggagaagttcgatgtgagcatcgccggcgacgtggagaagggtcccgaggggaaccgggtcaaggacgttgacctcaacttctcgctgagcttccccgacaccgacgagggacgcaccgcgcagagcctggtggcccggctggtgaagctgagccacgacaaggactgcaccgtgggacgcaccgtgatgctgcccaccgaactgcacagtgctgttgatggcgaggttgtcgcgtgaggcgaccaaccacaacaaccaacccacgacgaccaacacagtaaccacagggtgaggggcccgatcggagaaatccagtcgggcccctcactgtgttgaagcctcctggcacccgccgcacatcgagcgcccccgcgccgccccgaacgttcgaatcaggccttgcggagcccgaattccggccggatcacacgggtgttactccgctcagaatccgttgggcgcaagatgggagttcgtcctccccaacgcccttacgtggtgcaccagtggggagcaatgatcacttctcgactattttgtgtgtccatgtgggggaatcaagaaatcccagggatctgcctgatttgaggggcgtggggcggccccagaatcggccgaaacgcccttcaacatctcgacgatccgctgcaggtcatcctcgccggcgaagtcgatggtgatgcgacccttcttgcgtcccatgttcaccttcacccgggtgtcgaaccggtcggacagggacgtggcgagttgctcggcgcgcgggtcgtgttccttcggacgcgccatccgctgcttgggcttctcgtctccccccagggcaacgatctcctcggtggcccgcacggagaggccctcagccacgatgcgctgcgccaggcgttcctgggccagcggatcatccagagcgagcaatgcccgggcatggccggcagacaacactgcggcggcaacacggcgctgcacggtgaccggcagcttgagcaaccggatcgtattggagatgtgcggacgcgaccgcttgaggcgtctcgcaagctcgtcctgtgtgatgccgaagtcacccatcaactgctcgtaggcggccgcctcttccaggggattcagctggacgcggtgcaggttctcgagcaacgcatcggtgagcatcgactcgtcatcggtggcgcggacgatcgccggaatctgcgcgatgccggcctcctggtgcgcccgcaatcgccgctcgcccatgatgagttcgtagtgcgtggcgtccagcttccgcacgacgatgggttgcagcaggccgacttccttgatcgactccgtgagctcctgcaggtcgtcctcatcgaacacctgacgcggctgcttcggattcggggtgatctgcgccaccggcagttccgcgtaataggaaccgtcagccatctggtcagatgcgggctcgcgaggttcctctgcggcctggatgtcggtgcgctgaaacagttcacccagtccgcggccgagaccacccggacgtgcgctcattcctgctccttcattgctcgttgcgacaattcctgggccaccttgcggtaggcgttggagcccaccgagttggggtcgtagttcaacacgctctgcccgtagctgggtgcctcgctgatccgcaccgagcgggggatcatcgtgtgcagcgtctccttcgggaaatgtgccatcacttcctccgccacctgcgccgagaggcgcgtcctggcgtcatacatggtcaccaacaccgcccacagctccaggtcgctgttcaactggcgcttcaccagcgaaatcgtgcgcatcaactgctgcacgccttccaacgcgtagtactccgactgaatcggaatgaggatgtcacttgccgcgacgagtgcattcacggtcagcagtcccagcgacggcgggcagtcgaagatgacgaagtcgacgtcgtggtcggcctcgtagtccctgatcgcacgcgaaaggcgctgctcgcgagccaccttcgagacgagctccagctccgcgcctgccaggtcaatcgttgccggaacaaccttgaggcccttcgcctcgggagagtcgaccaccaggtccgcgacgggaacctcgtcgagcaacagctcgtagcttcccctgacgccctcctggtggggaatgccgagcgcagtggacgcatttccctgcgggtcgacatccacgacgagcacattgagcccgccctgggcgagtgcaaccgccaggttcaccgacgtcgtggtctttccgaccccgcccttctgattggcaataacaatgcgccgcggtgcatcgaggtgcggcagtggaacggtcttcactcgtgtttcacgtgaaacattcatcgtctccaacgagagcggctcctcatagagcgcccgctccggacggtgcctgggttcttcggggggacgcggcgcaggatgccgggcggccggattgcgtagcggtcgcggagcggcggggtcatcgctaccagtcaaggcctcaccctcctcggacgtttcacgtgaaacatccaccgctggatccacgtcgttggtgagtccaaccgcggaatcgttctgctcgacccggccgctcgcagctcgcgagccatcaggccgcggggaacttccagcgctcgagtccgagtcatcggccatcgatgtttcacgtgaaacatcgtgcttctcctcgtcggacgccattccactccccactgcatctcgcgagccccttggctcgatgtctgagtgatgggcgcccgcactgctctggccatcacccacggcgctcaatgtttcacgtgaaacaagtgggacgtcattccctggcaccacaccgataggcgccgccggctggatcgacggggaggagtccgccggcgtctggccactgtctttcccgctcatgccagcctgctcatccgcggatgtttcacgtgaaacatttggctctcccatggagccgggccggtgtgagtcagggtcgccatcaccggcgtcgtcttcgcccgaagcatcgtcatggtcgtcaccgacggggcgcgtcgcacccacttcgagggtctcgatgtcacgcccatcaatggtgtggcggggcacctcgcggtgctcctccgcagtgatctccagttccgaggggtatcccagcggacgcgtcgtcttcctgtgatccttcaccggataacccagtggttcgctcatcgcgatcatctccatccatactgacgactccgacagctcactctactggcccgcggcgactgaaccgctgcacaacagatccacacgacaacggacccgtctcacaacaatcggtccgctaggaaatctttccctgagaagccctctgcgccaccggtgaaggacgaaatcggctcgcgcgcacgacttcggaaaggccgggggaggtaccccacaaagggcaccgcctgcgaaatgctctggggtggcaggcgtggcctcagcgatcactgcgctcccacgctggcccagccctccacgcgcgagcgagcgcttcccccggacactctgggggacagcgccatcgccggtgccaactctcgctggggatccacggcgaagcggacccaatggagatcgaccttctgctcgtggagtcctggcgccataccgacccgccagtaaaggtgccagacccccagccagcgccacccgcagtgcgagcgggtcgaagcgtggatgctccccgaggagacaccccaacacgcctccgaaaccccgagggcacctgctctgctgaccgaatgaaccgtcctggccgtggaggctccgaggcgcgctctcgcgaaccgtccccggacccggctgctcccttgcagccgctcaagtgagcggccccgaccccccagcagctccccagaggaccactcacgtgagcatcgccccacccccgcatgctctcgcttcgctgcacgagtgcagcgaagcgagccccggcagtaccgctgtgaaccactcgctcgaactgcccggccccaggtggtcccttgacgtcccccgccaatcgcccgggcggctccaactccgctgaccgtgcgaacagaccccaccgcacgtcttcggcgcactcatcggagcgtctaggtcgggactactgaaccctcggggcgcccgcgccacgccgcacgatcataggaaggatcccgccgcggcacacaggtggaccatgcgtccacccccgggtacggcagcctcagccggcctgcacgcgcaggatgtgcgcgacgtccacctcgggggtcgcccgcacctgcatcacctgggcgctgagcccgttgcgggcaatgatgtcggcgctgtcggcgagttcctcgtcaatcgactcacccttgagtgccagcagctcgccatcgggcaggaacaacggcatcgtccagcccaacagcttcggcaagcgggcaacggcccggcaggtgaccacgtcgaagtgctgcttgaggtcctcagcgcgtccacgctccacgagcacctggccatcgaggcccagctcgtcaacggcctccttgaggaagttgaaccgccgcagcaagggctccagcagcgtcacattcaggtcgggacgtgcgatggcgatcaccaggccgggcaggccggcaccactacccacgtcgagcacgtcaacgccctcgccgatcacctcgagcagcgcggcgcagttcatgatgtgccgcgaccagatgcgctcgggctcccggggccccaacagcccccattcaacgccttgtccaaccaatatgtcgacatatccactcatcgactcgaactggtcaccgaacaacgcccgggcaccctgcgcagcctgctgttcgcggcccgcgtcgtcgtcacgcgcctgcgccacgcggcgttcccgggaagcgtgcacgccgtgcggcgcatcgtccgagggcccgcccgtgcgctccacgcgaccatcatcgcgtcgagcagcaccgtgccgggcgtcatccatcgggtcgtccatcggcgtgtcgctcaccgtcggctcacttggcgggctgcacgatcacgcgacgtcggggctcctcgccctccgactcgctgaacagccctgccgccttcacggcgtcgtgcacgatcttgcgctcgaaggggttcatcggggcaagccgcacgggctcgccggtctcgttcacgtcgttgatcgcgtcctgggccagcagctgcagctccttgcggcgcttctcgcggtgaccggccacatcgagcatgaggcggctgcggtgtccggtggtggtgagcacggccagccggctcagttcctgcagggcctcgagcacctcgccgtcgcggccgaccagcacctcggagtcggtgaccaccgagacatgggcgcggtcgccctcgctgtaggtgtcgatatcgccgtccaggtcggcgatgtcgagcagttcctcgaggtagtcggcggcggcgtcggcctcctcgatcagggaatcctcggcgctagacgacgaacgctcgcgtgccacggggccggcgggcttctcctcgtcggagtcgtcatcctcgccctcggtgtcgtcctcgtcctcgtcgtcgctgtcatcctcggcatcgtcatcggcgtcttcgtcggccgacaccggaccaccctcggagatctcgtcctcgacggcctcctcgtcctcgtcctcgagcgcggtgaccttgcgcgccaccggcgagtcatcgggctgcaccggtccaccctcggccacctcatcggcggcggcagcctgatcggccgcaacctcggagtcgacctgctgggccaccggcgactcgtcgggctgaacggggccgccctcggactcctcgtcggcaaccgcgtcctcgatggcctcctcgctggcgtccacctgctcgtcgggcgcaagggagtagtcctcggtcgccgtctgatcggcagccgcctcctgctccgtggccgtcagctcgtcgtcgcgcttgatgccctgctcttcactcatgaaagtctcctagtcgaaacatctgaaagctcaatggggagcgccagggcgctatttcttcttgcgggtggcccgcgtctgacggctgggctggcgacgcaccacggtctgccggtcgctgtcgtcgcgacgcacggtggtgcgctgggtcgactggcggctcaccacggtgcgaccattctcatcggtcttcgcctgggcggtcttgttgctggcgcgcgggtgcttgcgtccacggttctgacgggcacgctcgatctcgcgcgggtccttgccctgctccttcatccgctcttcccactcgatgtaggcaggggtgcccggcgtcgggtagttgcggatgatcacatactgctgggccatcgtccagatgttggtggcaagccagtagagcagcacgccgatgggcattgccatgccgccgaacaggtacatcagcgggaacatatacagcatcatcttctgctgctgggccatcgggccggtctgcgcggccgggggcatattgcgcttgagcatgtgcagctgctgcacgaacatgaggccggtcatcaggatcgccagtgcgagggcgaagccctgggtggcgccgaaaccaccggtcaggggccagaaggtgcccgacagcttggcgccgaacaggtcggcgtggctcagtgaggcggtgatctcggggctgcgctgcagccagtagccgtgcacattgcggtcggacgccgcggagctgagcacccggaacagtgcccagaagatcggcagctggatcagcaacggaaggcacgacgaggcggggttgacgccctcctcgttgtagagcttcatcgtctcctggcccagccgctcacggtcggagccgtacttcttctgcagctcctcgaccttcggctggatggactgcatggcgcgcgaggagttcagctgcttggcatacagcggcatcatgagcagccggatgaaacaggtgagcaacacgatggccagggtccaggtgaggccggagtccgggttcatgaagaacgagaacagcttgtggaagagcacgatgagtccgctgaccgcccaatagagcggctgcatgatggcagacccgatcttccccagggagtcgccaatacccatcaacgtcaacaaaccggcgttcaagtgattcacctcacaaagcggcgttcccggtgacggcgctggtgccggccgcggaacgctgagggcggctgccctcgtggtcatggttcttcaggttgtggtcgtggccgccgacctgctcacccgcggcaatgcgggcctccagtggcgaaccgggaacgggatcgaccccgcccatcgaccaggggtggcatcgggccaggcggcgcatgatcagccaactgcccctcacggccccgtgcagctgcagtgcctcgagaccgtaggcggagcagctggggtagtacttgcagacgtcgccgtacagcggcgagatgaacttgcgccaggccttcacgaatccgatcagcaggaacttcatcgcgcaccgcccgagggggaggtgccggctgccgacggcgcgggcgtgagccgggccaacgcgcgatcccaggcggaatcgaagtcgccggccaggcgcttcggttcggtggccgcggcgggcagcgcccgcacgaccacccgcagcgccccgggcagggggacgtccgcggtggaggccaccacgcgggcgcgtgccatgtggcgcagccgacgcttcacccggttgcgggtgacggcgttgccgaccttcttggacacgacaaagccgaccttggtcgatgtgggctccggggtgttgccccgcggggcgtgctcggcaaggtcggcgtgcacgacaagggttggccggccgacccgcacaccatgacgcacgatgctgcggaactcagctgagttacgcaggcgtgccgcggtcggcagcacgacgctcaggcagacagctctgagcggcccttgcgacggcgagcggccagaatggcccgcccggcgcggctgctcatacgagcgcggaagccgtgggtacgtgccctacgacggttactgggctggtaggtgcgcttgctcacgagaagagctcctgaatatctgagagtggcggttcgcatcgccccgagaacccacaatcgtggaccaacccgaaaatgggacaggccggcacggtgcgaggacgcgaaagcggccgctgacgtcagcgactcgggcaagtttacgctgaacagcgctccgttcccaaaacggcccactgttttggcgcggaccgccctgcgttctggcgcggaccgcccgctggcgtgggtgtggaccgtccccgtccccgggcgcagacggtccggtccgccgggccccaccgccgggcgtcgcaacggcccgcaatgccacgtctgtgcaacaggctcgggagctgactagactcgccagaagggctttggccagtcgacacgccgtaatcgggtgtgttcgccggtcatggctttgcaagtactcggctgggaaagtagcgtactcagccgaccccccgatccgatgcacgatggtcccgcttcccccggaagcgcccgttcggcgtcccctcccgggtggtcagtgacaaaagcagacacgaccgcggcgtgtgatccgagtagggtcggcacaatccgccgacgagagcgaaggatggacggtgtgactcgggctacagacagtgctcaaggggcccccgacctccctgatgcgtggaagcacgtgctctctgacttcggtggccgcgacaaggcctacctcaggggtgccaaggccctcaccgtgcatgagtccaccgtgatgatcgcggtgcccaatgactacacgcgcgagaacatcgaatcgaagctgcgcgacaccatcgagtcgcgcctgtccgatgtgtaccaccgcgagatgcgcctggccatcaccgtcgagccgagcctggagctcgacctgcgtccccccgaacgcgacgaggaggccgagcgcgaggtggagccggtgcagttcatcccgcgccaggacgccccggcgccgagcctgcgtgcggtggagaccccgcaaccggccagcgcggaatccgccgatgacaccgcgatcgccgatggacgcctcaatccgcgctacaccttcgacaacttcgtgatcggctcgtcgaaccgcttcgcccatgctgccgcggtggccgtggccgaggcacccggcaaggcgtacaacccgctgatgatctatggcgaatcagggctgggcaagacgcacctgctgcatgcgctgggtcactatgtgcgcaactactactccaatgtgcgcgtgaagtacgtgagcaccgaggagatgaccaatgagttcatcaacgcggtgggcgagaaccgcacggccgagttccgccgcaagtaccgcgacgacgtcgatgtgttgctgatcgacgacatccagttcctggagggcaagacccagacccaggaggagttcttctacacgttcaatgcgctgcacaatgcccagcgccagatcgtgctcacctccgaccgtccgcccaaggcgctggaacagctcgaatcacgcctgcgcagccgcttcgaatgggggctgatcaccgatatccagccgcccgaccccgagacgcgcatcgcgatcctgcagcgcaaggccgccgcggacaacctttcggttcccccgggcgtgctggagttcattgcctcgaagatccagaccaacatccgtgaactggagggcgcgctcatccgcgtgaccgcctttgcctcgctcaatcgcgaggaggtgtcgctggccgtggccgagcaggtgctgcgcgacctgattcccgatggcgccgaggccgatgtgaccgccccgacgatcatccacgagaccgccaactacttcggcgtgagcgtcgacgacctcatcggcccgagccgcaaccagaccctggtgatggcccgccagatcgccatgtacctgtgccgcgagctcaccgacctgtcgttgccgaagatcggccaggaattcgggggcaaggaccacaccacggtgatgcacgccgatcgcaagatccgcaagctgatgagtgagcgccgcagcgtctacaaccaggtgaccgagctcaccaaccgcatcaagcagaattccgcgcgccgctagtcgcaggtgagatgaggccgcagacgccgacccccaccacgagcacccccacgcacatccacagcgcgggcagcagcccgtcgacgaacggctgaccgggacgatagctgccggcgctggtgaagatggccgtgcagacggcgacccccagcgtcacgcccacctggcgcagggtggagttcacgcccgacgccactgcgtactcggggccctggcgaccctgcagcgccgccgtggacagcggtgcgaagctcaggcccatgccgacgccaccgacgaacatcggggcgatcacggcgccgtaggtgacgcccggcgacagcacgagggccatccacagcagcgccaccgcctccaggccgagtccgatcatgagcaccaggcgcacgccgatgcgctgcacgatcaatccgacgatcggcgccatcaccatcggcatcagcgtccagggcgcggcgcgccagccggcacccagcgccgagtagcccatcgacacctccaggaactggatcagcaggaagatcgcgccgaacaccccgccagcgaacaggaaggtggcggcattggcggcgctgaacacccggtcgcggaacatggcaaccggcaggaaggccgagcgcgcgcgacgctcacgcatcaggaagcagacgatgcacaccagggccacggccagtccgagcagtgtgcgggcgctggtccagccgtggtcgggggcctccacgatcgtccacacgagcatgaagatcgacgcgatacccagggccatgccaagcaggtcgatgccccgacgctcctgcgacccacgcgcggcggcggcaccccgcaggctcaccagggcgagcacgatggccaccacgccgacgggcacgttgatccagaagatcgcgctccagtgcaggccctggatcaccgcgccaccgacgatcggacccgcggcagtgccgatgccattgaccccgccccagatgccgatcgccatcggacgcttcgccggcggcaccatgtcggccaacagggccagcgacagggtgacgatcgccgccgcgccggccccctccacggcacgcgccgcgatgagcatggccgatgaaccactcaccgcggcccaggcggaggcgccggtgaacacggtgatcccgatgaggaagacgcgacggcgtccgaagcggtcacccaacgcggccgcgggcaacaagagcgccgcgaaaacgatcgtgtaggcgttcacgaaccactgcaactgcgtcaccgaggcgttcatcgccttctggatcaccggcaacgcgaaggtcatcaccaggtcgtccagggcggtcatcagggtggggagggcggcggcgatgatcaccatcgccaggccgtggccggcgcgcccgcttggtcggcgcgcatcggactcgggtgcctcgggggcgcccggggactgcctcaggattgtcgtcatgttgactccgttccactagatagtgtttctatctaacagaactagatagtatgtctatccagtggcgggtgcaagatcgtcccatggcaggcgccgacgatgcgttcgacaccgggacgccgaaccccgggcgctgggccccaacgcaatgggaacagtgcaatgaacaacagtgcagtgaacaacggggcaacggagaacagggcgaaggacgacagggacctcagggaagggtgcatcgatgcgcatctcggagctggcgcatgcggcgaaggtgccgctgccaaccgtgaagtactaccaacgcgaggggctgcttccccccggacgggcggtcaacgcccgcgagtcgcagtacggcgaggagcacctgtcccggctgcgcgtggtgcgcgtcctggtcaccgggctgggcctgaccattgcccaggtgcgccatgtgctcgacgtgctcgacggcccccagcgcgatccctaccaggcgatgggcgaggcgacgaagaacctgccgctcacggcaccggcgtcgcagaccagcacccccgacgatgacgtcgccatggtgcgcgccctgggtttcacccacatcatcgatccgcagttggccggccagctcggcaatgccctgcgctgggcggccgaatcaggcgtcagcgtgaccccggagctcctcggcgcctacctggacgccacccggcagatcgcccgggccgacttcgaggtgattccccgcacgaactcccgggagtcggtctccttcgccgtggtcggcaccgtggtgatggaaccggtgttgctcgcgctgcgtcgactggcccacgaggagcttgcccaggagatggaggacgacgagggctagctgtacttccccgtgacgttgtgaacgcgggctgagggagtctggccgccgatcccggtgtggggtctgtggtgattgtagtgatggagccaggtctcgtaggctgcggcgcgctcggcttcgctggcgtagggcttcgcgtaggcccactcgacggcgagggttcggttgaaccgctcgaccttgccgttggtctgcggccggtatggccgggtccacttgtgcttcacctcgtcgccgagcgcgtcagcgaaggcgcctgaccggtagcaggaaccgttgtcggtcatcaccgcggtgactgtgacgcccaggcctgcgaagaacgcgttcgcgcgggtccagaaccccgctgcggtctctttgcgctcgtcgtcaaggatctctgagtacgcgatccgggagtggtcgtccacggcgtggtgcagataccggtagccgcgagagccggctgccccggcacgggctgccttgtcgcgggccactcccgcgtgacggtcctgcatggatccgcgaccgtgggcacgccacccgccgccgtcggggatccggccttgtttcttgatatctacgtgcacgagctggcccggcgcggcgacctcgtaccgtgtcggcttcgggcggcgaaccggcagcccggtggcctggtcgatgttgatcagcttcggcatcttgtatcgggcgagcacccgaccgaccgtggaacggtgcaaccgcaggtgatacgcgatccggtgcggaccccaccggcgagtgaaccgcaacgcgacgatccgatgctccgtcttacgcgaaagccggttcggtgacgaggtgggcctcgaactacggtcgatcaacggcagccctgcccggtacctgtcggcccaccgcttcaccgtcgcgggcgagcactggaaccgttccgccgcccgccgcaacgaccagccctgttccacgacgagaacagcaagacgacgacgcccttccggtgtcaagggtgcgttagcgtgagtcacgaagacctccgtggtcaggagagtgagtgtggtaacccacatcctgcccggaggtcttcgctacctcacccgttcacaacctcccggggaagtacagctagccgggcccgcggcgcgaccggccaccccgtgcgcgctcgatcccgtgccgctcgatggcctcgcgatagcgctccaccaggctgcgggtggccgcggcccagtcgtggcgctcggcctcggcccgggccgccacggccatgagggtacgcagccgacgcgcggcgtcgtcgtcgcccagcaggcgtcgggcacggtcggcaaacccggcgccgtcatggggcgtcaccagaaagccatcggtgccgtcgtggatcacatcgggcagcccgcccgccgcggccgcgatcaccggcacgcccgaggccatcgattccagcgccaccaggccgagcgtctcggtggtggagggaaagacgaaggcgtcggcgctggcataggcggcagccagctcactgcccgccaggtagccggtgaacacggtgggcgtacccacgaaggcccgctccagctcggcgcgggccgggcccgaacccaccatcgccaggcgatatccctgcgcgcccagcacgcgcatcggctccaccaggtcggccaggtccttctcccgactcagccgccccacgtagatcagcagccgggcatcggggtggccgtcggtgagccgggcgcgcatcgcggcactggcccgcccgggccggaacgtctgcacgtccaccgccttgggccacagttccacgtggcgcacgccgcgacgccgggcccggcgcaccatcgtcggcgaggtgcacaggttcacctgcgcccggttgtgcaggaaccgcgtccacccgaccatgggacgccgcgcccacccgacgcccagcttgcccaggtagtcggccaggtcggtgtgatagctcgccaacagcggcagcctgcgatgcacggccacctcgacgccgaacgccgccagcgccacggggttgaccgcatgcaccacgtcgggacgaaagtgcaccatcttgtcggcgatgctcggtgtgggcagccccaccttgatctcgggatagatggggcgcagcgagaaggagcgcacccgcgacaccggttgacccgcatggctggccggtggattcccgggcgcgaagacgagcacctcatggcccatctcgccgagctgctccagggtgtgggtgagccgggtgaccaccccgtcgaccttgggcaggaagacctcggtgaacatggcgacgcgcatggcgtcggttcccctagcccgcgtcgatcgcggtcaccggatcggtcggcaagccgccgggggaatcctcgcggtatgcggccgggataccgggctggcggtccttcgtccacagggagcgggccgggatgtgggcgaagtccacccggtcgcgatatttggcggcggtctggttgatctcgccgagcagcccctggctcagcgtggtgggatgcaggcccaggtcgaggaatgcctcggcggtgacgtgcagttcgttctcgtcggcctcgttgcgcggatcgggcacgttctccaccacggccccggtgaggcgtgccaccatcgcggccaggtcgcgcacccggtgggtctcggtcatctggttgaagatcttcacccgcacgccgcgctcgggagggttggccagcgccaactcgatacagcgggtcatgtcctggatgtggatgaacgcccgcgtctgaccgccggtgccgtgcacggtgagcggatagccgaccgcggcctgcaccaggaagcggttcaacacggtgccgtagtcgccgtcgtaatcgaagcggttcaccagccgctcatcgagctgcgtctcgggggtggacgtgccccagatgatgccctggtgcaggtcggtgatgcgcagcgcgtcgttcttcgcgtagtaggcgaacaggtcctggtcgagcaccttggtcatgtggtagatcgagccggggctggtgggatagaggatctcgcggtgcatctcgccggcctcgccgttcacggcgacgtcgagatatccctcggggatcttcatgccggcggtgccgtagccgtagacgcccatcgtgcccaggtgcaccaggtggatgtccaggcccgattcgacgatggcgcacagcacattgtcggtggcgttgacgttgttgttcaccgtgtagcgcttgtggcgcgatgacttcatggaatagggcgccgagcgctgttcggcgaagtgcacgatggcgtcgggacgcagcgtgaccagcaggtcgagcaggcgctcgtagtcggtggcgacgtcgagctccaccaggtcgagatggcgtccggtggcctcggcccaggcagcacggcgctcggcgttcgagcggatgggggtcagtgatccggccccgagttcctcgtcgatgcggcgtcgggagaagttgtcgacgatggtcacctcgttgcccagcgccgacaggtgcaggcttgcgggccacccgcagaagccgtcgccaccgagaaccacaatcttcatctgcgtcatcctttgctcacgaggtcgggccccggggggtgcttcgcgtgtgaacgccgtcgctcaccacattaaccagacggccctgccacacttcgcccacctgcggccggcctgacgcgaacggacggccgcagccatcagatttcaccaagttttcatgcggttctccctgtccgcagacctgtggataactcgccgttcatggggagatcatgtggacgcccatccccagccctccgccgctgtccacaggcgtccacaggcgcatggcgtgtcgtcaacagcgcatcaacaggcagatcgggccgaatcacgcctgaaacggcagttgtccaccggatccacacgtgtgaagaggggtactgaatggacatacaaagaagagattccaagtctgctgcacccatctgtggacggccccacgagccacgggaagacggctcggcagggccccgaaggtgcgctaacgtgaccgtcgtgcccccacaagacagtccacgagcacgtcgtgccgcagccgacgatccgggtgtatcagacggcgttcccgaagcgacgtccgccgccctgcatgccgacgagcagcccccgctgggcgaggtccccgtaccgcgggatgacaactcggagatcgctgcgtacaccagggacctgaccaaggtctacggcagcggcgacgccgaggtggtggcgctcgaccatgttgacgtcgacttcgtcaaggcacgcttcaccgccgtgatgggcccctcggggtcgggcaagtcaacgctgatgcactgcgtggccggcctggacgcacccacctcaggcgaggtggtgatcggcgacaccaacatcgccaccctcaaggactccaggctcaccgaactgcgccgtgaccgcatcggcttcgtgttccagtcattcaacctgattcccacgctcaccgcgctggagaacatcgagttgccgatggcgatcgccgggcgcaagcccgacccggaatggctcgaccacgtgatcgacatcgtggggctgcgcagccgcctcaagcacaagccgtcgcagctttccggcggccagcagcagcgcgtggcgtgtgcccgcgccctggtgggcaagcccgacatcatcttcgccgacgaacccaccggcaacctcgactcggcggcctccgccgagatcctgggcttcctggcctccagcgtcaccgacctgggccagaccatcgtgatggtcacccacgaccccaccgcggccgcctacgccaatcgggcgttgttcctggccgacgggcgcatcgtcgccgacatggacgatcccgaccgcgacaaggtgctcgcccgcatggtcgagctgagctccccggttgacgcgtccgcacccggtgcgtcgacgcaggctgccggtccttcgacagttcagggctgacatgtggaaggcgtcgtggaagtccctgatgggacacaaggtccggctgctgttgtccgccctgtcggtggtgttgggcatcgccttcctgtcgggtgcgctcaccttcaccggcatgctgtcgaacaccttcgccgcgatcacccagggcacgatcgccgatgtgtcggtgggggtgaagggcacccagagcattgactcggtggtgaccccggattacacgaagaaccacctgaccaacgccgatatcgaccgcatccgcggcgtggcgggtgtggagtcagcctcggggcagatcacccagatgaacacggtctacctgttgggcaccaacaacaaggtggtcggcatggccgggccaccgtcgatcgccagcaatttcaccaccgagccggcaatgaatcacaagcccggcatcgaggtgcgcagcgggcaggcacccaccaccgacgacgaggtggcggtggatcccagctcgttggagcgcagtggctatcacctcggtgacacggtgaaactgcttgccaatggacagaccatcaccaagaagctggtgggcacggctgcctggggttcgggtggcagtgccggtgccgcctatgtcttcttcgacgacgtcaccgcttcccagctgctcatgggtggcgcaccgggctatatgcaggcggccgtcacggtgaaggctggctccgatgtcgacgccgtgaccaaggctgtcgctgccgcggtgccggatgggttcgaggcggttccgggacatcaggtggccgaccagttgaagaccgcgctcgaccaggcgatggacttcgtcaacatcttcctgggggtcttcgcggcgatatccctggtggtggcctgcttcctcattgtgaacaccttctcaatgctggtggctcaacgcagtcgtgagctggcgctgtaccgggcactgggcgcgtcccgcggtcaggtggcatggtcggtgatcttcgaggccctgctgaccggtctggtcggcggggtcatcggggttgggctgggtgcctttctggcttatggaatcggagaagccgtgacggcggctggcatggatatggtctcttcggtgcccatgccgtcgtggcagaacgcattgttgtcggtggtgatcgccgtggtggtcacggtggtcgccgcctggttcccctcgcggcgcgcgagccgggtgccgccgatcgcggcaatgactggtgaggtgacgtcgggcgaggggggtctggggcgtcgcacgctggtcggcacgatcatgctggtggtcggcatcgcgggcatctggtcgggtgtcaccctgaaggtcagcaagaatatgtggctgctgggtggaggtgccttcctggtgctcatcgcggtcaccttgatgagcccggtgatcgggcgtccgctcatctgggtgatgggacgggcctaccggttgttgttcggtgagacgggaaagcttgccgagctgaatgcgatccgactgccccgacgcaccgccgccaccgcgtcggcgttgatgatcggcatcacattggtgtcaaccctgtcgatcctgggcgcctccgcgagcacatccaccgagcactccgtgcgggacagccttcgtggcgactttgtcatatcgagcctcaattatgggccgctgcctgccagcctcttcgacgaggtgaaatcgacgcagggcgtcgcctcggtgcatcgggcacggacggcggcgaccacaatcaacggcgcgcgcgcccgggtcatcggctatccgaccagcgatttcaacaagatccaggcgcagtcgatggtcaccggcaccatgggcgatgcgctgggcgaggtgatcgtctcgcaggcctacgccgacgagcagaagctgcaggtgggcagcacgctcgagtcggtggacgccgccaccatggcgccgctgaagctcaccgtcaccggcatcttcaccacgcccaagggaggtggcttcggatcgatcaacgcgaaccttgccaccgtggcagccctgggcaaccgtgaccgcgacagccaactgtcggtggacgccgcaccgggcgcgtcgcaccagtcggtgcaggacgccctcgattcggccaccagcgacaacccgctgatcgtggtgcagaaccagcaggaatatgccaaggcgcagagcgcccagatcgaccagatgctcaccactgtgtacgccctgctggggttggccgtggtgatcgcggtgctgggcatcgtgaacacgctggccctgtcggtggtggaacgtacccgcgagatcgggttactgcgcgccgtgggcatgaagcgtggccagctgaggctgatgatcaccctggaatcggtgatcatcgccgtgcttggtgccgtgctcggcctggtgatgggcctgggcttcggcgtggccctgcagcacgtgctggttgaccagggactgtcgatcctgtcgatcccgtggggccggttgggaatcttcctggccgtgtcggtggtggtgggcgtgctggccgcagtggtgcccgcccgacgcgccaccaagctgaacatgctcgacgccatttccagcgaatagggatattgcgacgccgtgctgcgatattccccggagttatcgcttgcggatatcgattattggcctcgtggggcccgcccggtgacgagcaggtgaattccctgccggacgcccatccctgacgcccagctccgcgcgccggcgggtggctcggtgtcccgcccggtggtgcaacccggtggcgcgacccatgtcccctgccgataccccggatggcatggcacgtcgcccgaggcggggcttcggggtgtgggggctcgcagggtgggggctggcccgtctcgtcggatgaacgcgccccggacggcgtcgtggctggtcagggccgtgtggccgcaacgacggccctgcacgcggtcgcgtcccgggcccgatgacgcctggtgagggacgccatggtcggtgtgctcgtcccggcggtttcccatgccggcagtcccccatgccggtggtgagttcgcggtcctgactggtgggctggccggggcgtccaccggaagtgggcccaacccggcggaatctgctttcgcgacgctgttgccgcaactatcgcgtcgacaaaccgcgctcgtggattggcgcgacatccgccgactgcgacgccgtgatcggcccgtgatggcgcgcgctcagtggaatcgggtcgcctggggaagctgcgcacaccggtggacaaactgttgataacttcgctgatcggagccgatgcgcggtgtttcctgcttgtcgggctgtggtgttgtggcggttcgcgtgccggggcgccaccgacggagtgacgcttttcccgcgtgaaagtgcgatcgttgaagcatttacggcctcgccggtcggtgccttcgggtgctccgcgggcagccgatggttacccagagagttatccacagggcggtgggttgattggtggataagtcgacaggcggtgggttcggcgtcgccagcgcggcgcagggcttgggggtgacgatgcgtcacgatcgggcccgcttgtcaaccgacacgaaggtgaccactgcccccaccgtgacggggccggcacagcacagatcttgcggccgaatgccccctgtggcgcatgatttcccgggatgggtacgtcgccgatcacgacgcgccaagggctcggggcgaggtcggtctgcgatgcgccggtcgatccccccgtccggtgttgcggccgtgccgtcccatgtcggccgggacgccgcagggcgccgtggcacgccctcgccgcgccccgctattggggcactccgctgttggggctgccaccgaaggaaccggtgtcctgaggcggaacccaggtcgccgtcgagcccccgcggccatgacgcaggaaatccgtgggttcgctgccctacgcgctcgatttcttcggcccggcggcggtcaccgcaggcggcgtcagagtgacgtcgggcgggacgtcgggcggtcggcaaggcggtcggaatgggtgaacaacgcgtgaacacattgcggggtgctttcagggagcgccataagggagcgcgataaggcagcgccataggtgatctcgcagagataagggattggcacaagggatttcgtgccggaaccgctattttcttcacccggtcctcgtccgcgcgggatatcgccgccatcccgcgggattgacggggcagcgccgcgtccacacgaccattccatgggtgcatcggcgtccgctcgccgctattgccggccgatggggtgcccgcagctctgtgatgtcgcggggtcatgcgtcaaccctcaaccgtcacttgccaccgctgaacagaacgtcggagcaggccgatatgatgcaagcgccgcggtaggcggcttgccgagtggtcgagaaagacagcacaacggagcgaggaatcagtgaagatcacagtcgagcgcgatgtcatggcggaggctgttgcctgggtggcacgcagcctgcccaatcgcccgagcgttccgatccttgccggcctgctcatgagggccacggggagccagctcgtgctgtcgagcttcgactatgagaccagtgcacgcatcaccattgacgcgcaggtcgatgaggagggcgaggccctcgtctcggggcgcctgctgtcagagatcgcccgcagcctgcccaatcgtccggcccgcttcaccgccaactccaaccacgtggaactggtgtgtggctcggcccgcttcaccctgcagatgctgccggtggaggactacccgcagctgcccgagatgcccgccgagagcggcaccgtccccagcgacgagttcacccgttccgtggcccaggtggtggtggccgccggtcgcgacgagctgctgcccgtgttcaccggcgtgcgcatcgagatcaacgacgatcgcctctcgctgctggccaccgaccgctaccgcatggcgttgaaggaactcacctggaatccggccaccacgcaggccgagagcgccgccctggtgcccgcccgcgtgctgtcggaatcggcccgttccatgggtggtggcgaggccgttgccctggcattgtccaatggcatcgagggcgaggggctcatcggattgtccggcgagggcgccggcggacgccgcgaactcaccacccggctgctcgacggcgaattccccaaagtgcgccacctgatggacatcaagcccaatgtcaccgtgcgcgtgaagaccgaggaggtgctcgagtcggtcaagcgcgtctccctggtcgccgagcgcaacacctcggtgcgcatggtcatcgaggacgaccgcatcgcactcgacgccgccaccggcgaccaggcgcaggccaccgaggccattgaggcccaggtgaacaatgtggccggcggcgagatggccgtatcggccgtggggttcaacccccgctacctgaccgatgcgctctcggcgcttgatacgccctatgtgcagttctcgttcacggcccccggcaagccctgcctggtgcagggactgcccgacgtcgatggcgagcccgaggccgactacaagcatgtgatcatgctgatgcgcctgcccggctgaccgatcgaccgcggagcggggctggcctaggctggcaccgtcgcattgatgtcgttcgggaggggtgcagccgatgttcgtcgaccacctcgagctgaaggactttcgttcctacgaggccgccaagctcgatatcggcccgggtgtgtcggtgttcgtggggcccaacggccacggcaagaccaacctggtggaggccgtcgaatacctgtcgacgctgtcgagccaccgggtgtcggccgatgcgccattgatccgcgccggcaccagccaggcgatcgtcagggcgctggtggtggcgggtcgcgacgacccccgcaagctgctgctggagctcgagatcaacgccggacgcgccaaccatgcgcgcatcaaccgggcgccggtgcggcggatgcgcgatttcatcggggcgctgcgcacggtggtgttcagccccgaggacctggcgatggtgaagggcgatcccaccgaccggcgtgccttcctcgatgccctggtgatcacccggtggccgcggctggccggcgtgaaatctgactacgaccgggtgctgcggcaacgtaataccctgctgaagacgctggcgcgacgctcgtcgcgcgtcgatgggggcgacgtggccaccctcgacgtgtggaacgagcggctggcccagttcggcgctgagctgttggcggcgcggctggcaaccctgtccgacctgatgccctatgcgcgggcgagctatgcggcgatcgcgccggtgaacaaccgggtggacgcccgctacaagtcgtcgttgggtgggctgtccgagctgctgggctatgccaccgacggtgcacccggtgagcttccggaggccccggacaccgacgacgaagtgcgcaccccggcgcccgggcccgaccagctggcggtgctcatgatggacgccatggctgcgcggcgcggcgacgaactcgcccgcggcgtcaccctggtgggtccccaccgcgatgatgtgaccctgacgatcggcaccctgccggcgaagggctatgccagccacggtgagagctggtcgctcgccctggcgctgcggttgggatcactcgacatgctgcgcgccgacgacgtggagccggtgctggtgctcgacgatgtgttcgccgagctcgacgtgacgcgacgtgatcgccttgccgacgccgtcgcgaaggccgagcaggtgctggtgactgccgcggtcggctccgacgtgcccgggcagctgaatgggcagcgcttcgacgtcgacctgcgcggatcggcgcacgccgggcatgaggagagcgccaccgggccgcgtgtttcgatcgtgtccccagccttgtccacaggctctgtccacaggtctgtggacaatgactgagcgcgaacggcaccccggtgaggcgccgatgccctggggcgatgggctgccgccgtggcagcgcgaccaggaagccccgccggagcctcccgatccgaccccgccggatccgatcctccccgattcgaccgaacccgtttccacagggcccgatcccgcggaagatgatccgacgagctctggctcgtcgaacggcgagcgctgggacccatcggggggcgacccatcggcaggcgggccggatgagggggcactgccggacgaccacgatcccgagggtttcgaggtggccaccagcgtggcccaccagctgtcggggatgttgcccccggccaggttgggcccgcgcaagaagggcagaaagcgccgtcggcgtgcccgactgttcgacgaggagcgatccggtgccggccccgatgtgcgcgacccgcaggcggtcggatcggcgatggagaagctcgtcaacgagcgtggctggcgcacccagttgggcctgcgcctgatcgtcgggcgctgggccgagttggtggggccgacgaatgccgcccattcgcgtcccgagagctatcgcgaccgggtgttggtggtgcgggccgagtcgagcacctgggcgtcggcattgcggctgctggcgccccagctggtggcggagctgaatcgtcgcctgggcgatggttcggtgatccgggtggacgtgcgtggccccgccgcgcccagttggcgccatgggcgtcgaacggtgaatggacgcggtccccgcgacacctatgggtgagtgatgcggtgggcgagtgacgccgggacgagtgggcagtggctgagtgacgccccgacgggccggctctggcaaggtgattcgtggcgaatccggccgccccacggtcaccacggtgggcgcatgtgaccacgatgtgaaagtcggggacagggtcttcacaggaacctatgagttccagtaatctgcactacaggacgaccgggtgccgttcagcccttgtttcaaccccacctcaaggagcactgccccatgaagactcgtgttcgctcccgcaagccggccgctggccttgccgggatagcccttttcgccagcggcctcagcctcatgtcaaccgtcgcatcccgtgccgattccgggctgcccagtggagtccacgagggggtgtgcatcccgaaggacggtgctggatcgttcaacatcatcatcaacaatgacgaccagatgagtcgaacgaagtacaccgacagctacgacaacatctaccgatgcattactcccccagcagcccaggcagctgggctgacctattcatcaccgatgaagtcattcctgcatgcggccggatttacgacaaccgatgtctctgacaagtcaattcttgcccaggatgatcagtggaagggctatacaaatggcgcagatggtacgccgctgacgaattcctacggggcccctttgaactcgatgatcgccgcttatgatcgtgatggatccgttaccacgcaaattgacggaaatccgagcaagtacggtcaggatctgccgattccgggctactgggatacgcaagtgggaacggcatcaagtggtaactggtggattcccaacaacggcccgaccggaaccggcggggtcgtggcagggtcgtatctctggaaccagcgagtagctgctggaacactcggccagcaggacgacggcacgccttttgaggagatacagaagggtaatccggcactgaagcgagattggaacacgatacattggaacacaatccaattcaatttcaatccatcgaacacacccgcgttcacatttattgattatttaggctttcgtgacctgaataatctgcctccgattgacgtaactcagcgggacatcaatgcaaatgtgacgctcaaactctcgaccatgtatgagggatatcctggaacatccttcccggcgcgtccagagagtgacttcgcggccggaaaactcaagacagttcagcgaacgcacgagaacgatcctgacgtgatacctgcagatgacgtgtcggaaccctccaccccaggtgtgagcactccgtcaccgcagccttcttcgccgcagccgtcttctcctgcgacgggtggtgatggtggtggtaccacggtgccgccggcgggtgattgcttcgtggatgtgcatgcgggtgatcagttcgcggatgatatttgctgggcgaagtcccaggggatcaccacgggttggcctgatggtacgtatcgtccggtgacgccgatcaatcgtgatgcgttgattgcctatatctatcgtttggctggttctccggcgtttacgccgtcgggtcagacgttctcggatgtggccccgtcgaatcagttctacaaggagatcgagtgggccgcgagcaccggtatcaccactggttggcctgatggcacgttccgtccgacgactccggtggcgcgtgatgcgatggctgctttcttgtatcggcgtgccgggtctcctgctttcgtggctcctggtgttccgtcgttcactgatgtgggtgcggggaacatgttctatcagcagatcgagtggatgaagtcgactggtgtgtccacgggttgggttgatgggacgtatcgtccattggacgctacgaaccgtgacgcgatggcagcattcctgcaccgctacagcaacatcgggaagtaaccacccgaacaaacaaaccagctgagggcttgtgggcgcggcattgaatcgtcgccccacaagcccttactgcgagccctgatggttcgcgaaccaggccgatgcccacccacgtggcattggccacctcattggcgggaatggccctgatcgtccgacaaggaccgcgccatctaccgccgccttgtgcccccgggatggacctgttgggcaatgacagtgcaatcagaagggatgtggcgatggccagcgaaggtgaatgggccaggtggcgtggcgacatgaggagttccgcgcgcggcgtggagaattcggccgcgaacattgagcaatcgtcggcgcgggccgcggcggcatccgaccggaccgccgagaactcggcccgcaccgccagggcgtcagaggacacggcgcgttcggcgcgcagtgcggccaccgcttcatgggtcagcgctggattcgccgccgtctcggccatccagaacgcacgtgccgcccgggcagccgaggaacagaccgccatcacgcagtcgatggccgcacaggaacagacccaccagttcgccatgtggcgccagaccgaggagggcaagcagtacgtggcgtggcgcaaccaggccattccgctggcgcaactgctgcgcgatcgccagacgcagtggcagctggcgtgggcccaggccatcggcaacgcccaggactcggtgtccgcccaggaactggaacacatgaagccccacaccgtccaggtgcggtcggggcgacttaagatcgccgcagtgatcctgttcatcctgggaggcttcggcctcataaccaccctggccggtgcgtccatgacgcgcgtcaccgtcctgggtgtggctggtccgctgctgctcgcgctactcatgctcgcggtggcggtctacctcaccgtgaacggcaagcgccgccgccaggaggaacagacgggcatcacctggatgaacaccgagctgaggagcatcgtggccgccgaggcggcccagcgcgtcgcgcgcttcggcttcgacccgctggcggtgccgcagggctacaccggcttcgcgtggggcgccaccttcgacccgagcgcctatgccgaccagctcatgtggatgatcatcaatgggccggtgaacttccccgagcccgatgagttgccggcgctggtgatgcccgacgtgttggctcccaaccccgccttccggccggaggtgaatgctgcgctggccgacttccagcagcagtcctgaatcaatccgctcgcccgggacgaccgcgtccctaccgatccgacgcgaggtgcccccaccgggggccggacgcgcaggacaggggcgacaagggcaccgtccacagtgcccttgtcgcccctgtcctgcgttgagccctcggcgtccacgtccaacccacccggtgcgcccggccgtccacgcgctgcacgcaccgacccggcgaaaaccgccacaacgccctgagcgccgcagcaccgtcgcaagtggaggggcacgcgaaacggggttaatcggctctgagcgccgattttgccgcgatttagggcaggcggcccccgatcgaccccgtccagacatgggtatcgggcactttggctggtagaatcgtcagggtgtgctgcgagcattcgcgcactgtgatgacaggagtccccaccggtgagtgaacagctgaacgaatcagccgtgactgagaagaccgaagacgagaagaggatggacgccctcaccctcacagacaccgaggacgactcggttgacggcgagtacggcgctgacgagatccaggtgctggaaggcctggaggccgtgcgcaagcgtcccggcatgtacatcggctcaaccggcgaacgcggcctgcaccacctggtgcgcgagatcgtcgacaactccgtggacgaggccctggccggctatgccgactccatcgaggtgacgctgctcaacggcggcggctgccgcgtggtggacaacggccgtggcatccccgtggccgagcaccccgccgagcacatctccacgctcaccctggtgctcaccgtgctgcacgccggcggcaagttcggcggcggcggatacaaggtgtccggcggcctgcacggcgtcggctcgtcggtggtcaacgcgctcagctcgcgcttcgacgccgacgtctaccgcgacggctaccactggcaccagagcttcacgctcggcgatccggtggcccccgtcgagcgcctggaggaaaccgagcgcaccggcaccacgatcaccttctaccccagcgccgacatcttcgagaccaccgacttcagctacgagacgctggccaccggcttccgtgagatcgccttcctcaacaagggcctgcgcatcgccatcaccgacgagcgcaccgatcatgtggacgaggacggcaagcagctgcacgacgtcttcaagttcgacaacggcctggtcgactatgtgaccttcctcaacggcaaccgcgagaccatgaccccggtgatcgacgtggaggcacacgcccccgaggtgggcatgggcgtcgaggtggccatgcagtggaacaccagctacgtcaccagcctgcacaccttcgccaacaccatcaacacccgcgagggcggcacccacgaggagggcttccgcgccgcgctcaccaccaccatcaacaagtggggtgagaactggggcctgatcaagaagcgcgaggaccgcgtcagcaatgacgacatccgcgagggcctcaccgccatcgtctcggtgaagctggtgaacccgcagttcgagggccagaccaagacgcggctcggcaacaccgaggcgcgtggcttcgtgcagcgcgccgtcaacgagcgcctgggcgactggatggagcagaaccccggcgacggcaagctcatcgtgcgcaaggcacaggctgccgcgtcggcacgcatcgccgcccgcaaggcccgcgacatggcccgcaaccgcaagggcctgctcggctccggcggcctgcccggcaagctcgccgactgctccagcaacaacccggaggagtgcgagatcttcatcgtggagggcgactccgcaggtggctcggccaagggcgggcgcaacccccgcatccaggcgatcctgccgctgcgcggaaagatcctcaacgtcgagaaggcacgcatcgaccgggccctgcagtccgagaccatcgaggcgatcatctcggcgctcggcaccggtgtgcacgaggagttcgacatcaacaagctgcgctatcacaagatcgtgctgatggccgatgccgacgtcgacggcgcccacatccgcacgctgctgctgacgctgctgttccggttcatgcccgagctcatcgacggcggctacgtctacctggcccagccgccgctgttccggctgcgctggaccaacgccccccacgagctggcctacaacgacggcgagcgcgactcgctgcgcgacaagggcctcgaggcgggcaagaagctgccctcggtgaacccgatccagcgctacaagggcctcggcgagatggacgcccaggacctgtggaccaccaccatggaccccgacaaccggatcctgctgcaggtgaacctcgacgacgccgcacgcgccgaccagaccttctcgatcctgatgggtgaagacgtggaggagcggcgacgcttcatccagcgcaacgccaaggacgtccgtttcctcgacgtctgatccgcgcgcgccccgcgtccccatccgtgcctgacaaggaagaacaatgagcgaaacaccacaaggccccggcgacaacgccgagacgcccaccaacaaccagcgggcccgcaagggctccggcgtcgatgccatcgccggccccgccaagggccgcgtcgacccggttgacctcacctccgagatccagaactcgttcctcgactatgcgatgagcgtgatcgtcgagcgtgccctgcccgatgtgcgcgacggcctcaagcccgtgcatcgccgcgtgatctacacgatgtacgacggcggctatcgtcccgaccgcggctggaacaagtgctcgcgcgtcgtgggcgatgtgatgggcaagtaccacccgcacggcgactcggccatctacgacaccctggtgcgcctggcccagccgtgggccatgcgctatccgctggtgtcgggccagggcaacttcggctcgcccggcaacgacggcgccgccgccatgcgttacaccgagtgccgcatggcgccgctggcgatggagatggtgcgcgacatcgaccagggcaccgtcgacttccagcccaactacgacaaccgcgacaccgagcccaccgtgctgccggcgcgcttccccaacctgctggtcaacgggtccaccggcatcgccgtgggcatggccaccaacatcccgccgcacaacctgcgcgaggtgaacgaggccgtgcagtggttcctcgaacaccccgaggcctccgatgaggagctgctcgaggcgtcgatggcacgcgtgaagggccccgacttccccaacggcgcgctgatcgtgggccgcaagggcatcgaggacgcctatcgcaccgggcgtggctcggtgacgatgcgcgcggtgatcaacatcgaggaggaccgcaagggccgcaccgagctggtggtcactgaactgccctatatgtgcaaccccgacaacctggcccagaagatcgccgacctggtgaactccgggcgcctcaccggcatctccgacatccgcgacgacagctcggcgcgtaccggccagcggctggccatcatgctcaagcgcgacgcccagccgcgcgtcgtgatgaacaacctgtacaagcacacccagctgcaggacaccttcgggtgcaacatgctggcgctggtcgacaatgtgccgcgcacgctgcgcctcgaccagttcatccgctactgggtgctgcaccagatcgaggtgatcgtccggcgcaccgagcaccagctgcagcaggccgagaaggaagcgcacatctaccgcggcctggtgaaggccctcgacatgctcgacgaggtgatcgccctgatccggcgctcgcccaccaccgagcaggcgtcggcaggcctgcagaagctgctcgacatcgatgacgtgcaggctgccgccatcctgaacatgcagctgcgtcgcctggccgccctggagcgccagaagatcatcgacaagatgaaggagctcgacaccctcatcgccgacctgaaggacatcctggccaaccgggagcgccagcgttcgatcgtcagcaatgagctgggcgagatcgtcggcaagtacggcgacgagcgtcgcacccagatcatcgccgccgagggcgatttcagcgacgaggacttcatccccgacgacgacatggtggtgaccatcacccgtggtggctacgccaagcgcacccgcaccgaccagtaccgcccgcagcgtcgtggcggcaagggcgtgcgcggggcaacgctgcgtgccgacgacgaggtgcagcacctgttcgccaccaccaaccaccagtggatcctgttcttcaccgaccacgggcgcgtctaccgcatcaagacctggcaactgcccgagggcggccgcgacgcgaagggcggccacgtggcggggctgttgagcttcctgcccgacgagaagatcgcccaggtgttggcgctgcgttcctacgaggacgccgaatacctggtgctcgccaccaagcagggattggtgaagaagacggccctgtccgcctacgactcaccgcgccaggcgggcctcatcgcggtgaacttccgtgccgacgacgatgagctgatcggcgccgagctggtggacgccagcgacgacgtgctgctcatctcccggctcggccaggcgatccgcttccgtgccgacgacgaacagatgcgtccgatgggtcgcacgacgtcgggcgtcaccggcatgcgcttccgcgagggcgatgaactgctctcgatgagcgtggtgcccgccgaacgtggcgaggccagcgacgagcatgccgacgaggaggatgagccgctgtacgtgttcaccgtgaccaatggtggattcgccaagcgcaccccggtgggcgactaccgcgtgcagaatcgtggcggactgggcatcaaggcgatgcgcatggacgacgagcgcggccacctggtgggtggcctggtggtgaccgactccgacgaggtgatcgcgatcaaggcgtcgggccaggtgacccgcagctcggtggccgaggtgaatccgaccgggcgcgacacgatgggcgtgaagttcgtcggcgtgcgcggcaaggacgaggtgatcgccatcgcgctcaacccggagaagcccgaggaggaggttgagggcgacgagaccgagcccgaggccaccgacgagatgggcaatgcggtgccggccaccgatgtgatcgaggccgacgccagcgaggccggaaccgccgcggccgatgacgacgaggacgcgcgagcgtccgacgagtagttgccgggcaactggcattagcgggagtctcccgcaaccggcatgagcgctggttgcgggagattcctgcgttcggggcttgatcggcgaaccaccgcgtccacatggcggaaatattccccgccggcttgaactgcggccggtcatgcgagaaggtaaggctaacctaactagctgattccatcagttggtttgacctgttcgcagagaggctgccgacgttgtcaccttcctcaagcaactcgcatgacctggagcccaccgtctccgaccagtcactgtcggttgcccgacgactcatgcgcggccagggccgtgcatcgatgcttgcctaccgcatggaccccgcgcagtccgtgcaatcgatggcccacggcgtcgacgccaagggccgcttcctcgtgtcgtggatcggaaatgcctgctgcccggtccccgaatcggccgaggtgaatcctgtgcgcaccgggggccagcccgagccggtgccggtgcgcctggagatcctgcgtcaatcacctgatccgatgacgcggatcgctgcagcgagcctccacctgctcggctcgctgtatgtcttgagcgacgatgagcgcatcgacctgctcgccgagcgcgcactgcccaccatggtgggcgacgtggccggcatgcgcggcgcccatgtgggcgtcctcgtctccgaccgcgtgctgctgcacgattgctacggcgtcacgccgctgtccttcgatgcgttggtcggcgaatccgccgacgcggccccggtgttccccaccatggccgacgacctggaggccttcgaatgcgtggcctgcctggcggagccgacgctgcgccgcgtctgcgattcggtgatgtgcgggctgctgcgcggccgcgtgcattccaccaaggccgtggtcaatccctgccccgccgtggccgacaaggtgttctgcgtggacgttgaccagaccggcatcctgttcatgcgggtgctcaacggccgcgccacctccgtggtggccgacttctcacgcaatgtgcattcactcgagggcctggacgccgaagtgtccgccctggtcgagagctcgacgctggttgacgattaccgcgtctgacaaggccggcgtcgggagtgggcgggcccgggacaaccgggctcgcacgcttcattgcaccgtcgccggaacatgaacaggcgggccaccgcacatggggatgttggtggcccgcctgcaagttgtggaactacttggcctggtaggcgaggcaatcagcctgcgagccaccgacctcgatggagcttgcggtgcacatgaggtccttgttgtgcgtgcactcgagacgctggcaggcaccgaccttgccattggccgacgacaggccgccgcgggcgtcgagttcgatgaaggtgcggcaggtgggcttcgcgtcgctgccaccgatggtgacggcgaatgcggtgcagccgttgtggttgaaggcgcaggccgaggtggaacaggacttgatggcggtttccatgatgattctccctttgttcgtgaccacgtctgacaattaccaatgtaagtgcgcataccgcccctgacaagcaagttcatcggctcttcacgattgagggtgtagttggggtctgaatcctccggcctcgaggagactgcgggcaatgtagttcgtcaggtttcggaagcccaaggctgagccgcgcaggtgttccagtcggccattgagggcttctgtcgggccgttggaggtgtgggggcgctcgaagtaggccaggacgtctgtggcgcgccgcttgagggtgcgccccagggtgatgatctcagcgagggcggcgggaacgccgcggctgatgacctcgatgacgtgggccagctgggctcgcccggccttggggtcgggatcgcggtaggcggccacgatcttctggtagatgccccaggtggcttccaccccgacgtgagcgtcctgggcgaagacgccctccaggcgggtgcgttgcttgtctgtgaggagatccatcccggtgtgcagggtcttgcgcaccccgtacagggggtccccggaccggcctcgatgtccggtggtgtcttgctggacgcgctggcggcagtggtccagggcatcgccggcgagctggacgacgtggaagggatccatgacctccaccgcgtcggggagttcttccttcgctgcggtcttgaacccggtgaagccgtccatggcgaccacctcaatccggtcgcgccacgcagggtcttgctggctgagccactccttgaaggccttcttggagcggccctccaccatgtccaacaacctggcaggaccccttccctcgcgcagcggggtgaggtcgatgatcacggtgacgaacttgtcgcccctgcgcgtgtgccgccacacgtgctcgtccaccccgatcgtggtcacaccctcgaagcgatgctcatcgttgatgaggaccctgcgtccctcctccaggacggaggtgttggcgcagtcccaggacacgcccagaccctcagcgacccgggcgacggtgaggtgttggacgacgatgccttccagggcccaacgcagtccgccccgggacagtttcgagcgcggctgggccgccccagtggtgtcctgcctccacacacgcccacaccccgaacagcggtagcgacgcactcgcaccaccagtgtcaccggtctccagcccgagggctcgtgggcgaggcgacggaccacggtgtcgcgggggatcccttcgcacccacactcgcgacaccaccggtcatcgtccaccacccggcaggccacctcgcagcgatccgggaggactctctggcccaccaccacgaggccgaggtcatccaggcgggcgaacgtggtcagatcgggggcagcaaaggtagcgtgggacacgtcggggtctttcagatgggcagcgtaggaactcccatcatcggaagaccccgaccctcacacccaccccgacacgccagccagactcaaccccccgctacaccccggatcgcgaagagcctgattatggccaggaggttcgcggcgtctacaacgtgttcgaacagtacaacgcggcactcaggggatgaatcaatgaccgatgtcccgctcgtcgcctcaaggcgagactaacgttgtgccggtgaacgaccaagctgtgagttcgcagccgactgttttccgacgcgtcatgttcggcgtcgcgatcctcttgtgtgatctgctcagcgcggcattgtggctcttcacgatcgagggtgtagtcgcctgagcgtgtcggtggtctggtaggggtcgaggtctccacgaggatggaagttcctgcactgcccatccggaagacctcgacgtgctccacgctaccttcaccgcgccctccctgaccacgttctgccgactcgatgagctcggtcttgaggccgtcgggcagatcgtggagccggatcgtgcggtcatcgagtgtcgcgtcgctgaaccggatcgctggtgtcgcaagtgcggatgcgagggcgtggctcgcgacacggtggcgcgtcggcttgcgcatgaaccgttcgggcatcggccgacgacgttgttgatccgggtgcgtcggtacaagtgctccgggtgcgggcgggtgtggcgccaggacacgtccaaggccgcgccggagcgggcgaagatctctcgcggtgggctggcctgggggttggcgggcctcgtcctcgaccacctctcggtgtcccgcgtcgccgccgggttgggcgtgtcctggtccgcggcgaacagtgcggtcctcgctgaaggggagcggcagctgatcgatgacccggcacggttcgacggggtcaccacgatcggcgtcgacgagcatgtctggcggcacacgaggaagggtgacaagtacgtcacggtgatcatcgacctcaccccgaatcggaacaaaacgggaccggctcggctgctggacatggtcgagggtcgttcgaaggccgtgttcaaggactggctcgcgggccgcccgaaggaatggagcaagcagatcgaggtggtcgcgatggacgggttcaccggcttcaagaccgccgccgccgaagagctccccgccgcggtcccggtcatggatcccttccacgtggtccgcctcgccggcgatggcctggaccggtgccggcaacgggtccagcaggccacgctcgggcatcgaggccgcgccggggacccgctctacaaggctcgccgcacactgcataccggcggtggcctcctcactgacaagcaacgcgatcggctcaccgcgctgttcgccgcggagcaacacgtcgaagtggaagcgacctggggcatctaccagcgcgtcatcgccgcctaccgcgaaccagacaaggacaagggcaagcagatgatgcaagccgtgatcgatgccgtcaccaccggcgtccccgcggcgctcgtcgagatccacaagctcggccgcaccctgaagcagcgcgccgcggacatcctcgcgttcttcgaccggcccggcaccagcaacggccccaccgaggccatcaacgggcggctcgaacacctgcgcggcaccgccctcggcttccggaacctgaccaactacatcgcgaggagtctgctcgaagccggaggattcagaccccacctacaccctcgatcgtgaagagccggcattgtcctactggccgcttgtgatgatcggactcgtcctcatgcaggtcaaggccaacgtcatcggtccagcggagcacattgtcggtgccggcgaggacagcttggccttcatggttttctacgtcgtcagcgcaatcgtggtgctgatgttggccgtgcttccggcagtgatcggcaacctggccctgcgccgccgggcgggctggccaccacgtgtctgcgtcgcggtcgccgccgccgtgatcctcgcaccggccgtcgctgcggtagtggccccgctgaccatgaacgagatctggtacagagcaacacactggtggtagacaaccggcccaggttccctacgagtcggccgatgccgaagatcgcttcggcaggagcccccacacccttctatagcgggcatgaatccgcgtgttcccgcgattcaggcttcacgaatcgtgaacttacggggctcttcgcagttgagggtgtagcccgggaccgccggctggttcgcggataggcgtcgaggtcttccaggatggaagttctcacgctcaccatccgccggaagacctcgacttgcaccaccctacgttcgtgacccctgacctgaccacgttctgccgtctcgacgagctcggccttcaagccgtcgggcagctgctcgaggctgatcgggcggtgctggagtgccgcgtcgtcgaggacgacccgtggtgtcggaagtgcggcgcggagggcgtgccgcgtgacacggtgacgcggccgctggcgcatgagccgttcgggcatcggccgacgacgctgctggtccgggtgcgccgctaccggtgcacgcactgccgccggacctggcggcaggacacgtcgaaggcggcggcgcccagggagaagatctcccgcggcgggatcgggtgggcactcacggcgatcgtggtcgaccacctcaccgtctcccgcgccgcagcagggctcggggtgtcgtggcataccgcgaacaccgcgatcatcgccgaaggcaagcgtcgcctgatcgacgacccggcgaggttcgacggggtcaccacgatcggtgtcgatgagcacgtctggcgtcacacacggtttggcgagaagtacgtgaccgtgatcatcgacctcacccccgcgaggaacaagacgggcccggccaggctgctggacatggtcgagggccgctcgaagcaggtgttcaaggagtggctcgccgcccggcctgcggagtggtcgagccggatcgaggtggtcgcgatggacgggttctccgggttcaagaccgccgcggccgaagagctccccgacgcggtcccggtgatggacccgttccacgtcgtccgcctggccggcgacgcgctcgaccggacccggcagcgcgtccagcaagacacactcgggcaccgcggtcacgccggcgacccgctctacggggtccgccgcaccctccacaccggcgcgagcttcctcaccaagaaacagaccgcgcggctcgacgcggtgttcgccgccgaggagcacgtcgaggtcgaagcgacctggggcatctaccagcgcatcgtcgccgcctaccgcgaacccgacaagaacaaggcgaaggagatgatgcgggcggtgatcgactctgtcagcaacggcgtccccgcgctgctcaaagagatccgtcgcctcggccgcacgctgaagcagcgcgccgcggacatcctcgcgttcttcgaccgccccggaacgagcaacggcccaacggaggccatcaacggccggctcgagcaccttcgcggttccgccctcggcttccggaacctcacgcactacgtcgccagatcgctcctcgaagccggcggattcagaccgctcctacactctcattcgcgatgagccagttcatcctaagaaatagggccggggtaggttagggtcacctacattctgagtattcacacggcgtgcacggcccattcctgagaaattcatgtcaccagggtttctccccgcagtttcccggctggcctacccttggggtggagcacttcttaggggtggcgcatatggtgaccaggccgacagcagtggccggcagcttctatccgggccagcgggggcggctcgcccgcgagctgaacacactcttcgagcaggcggatcgtccaccggcgcaggtgagcccggccagggtgaaggcgatcgtggtgccgcacgccggctatgtctactcgggcaccacggccgcaaccggctacgaactgctgcggggacgccccatcaaccgcgtggtggtgctggggcccacgcaccgggtggggatccgcggcatggcgcttgccggtgccgacgccttcgacacgccgctgggctccgtgccggtcgatcccgacctcaccgccatcgccgaggcggtgccgttggtggtgacgcgtcccgatgtgcacgcccgggaacacagcctggaggtgcagctgccgttcatcaggacggtactgccgcaggccagcgtgcttccggtggccgtgggcgacgcgctgcccgacgaggtggccgcgctgctggacgcggtgtggggcgagtccgacaccgcaatcgtcatcagctccgacctgtcgcactaccactcctatgacgacgcccggaagcttgatgccggcaccatcgacaaggtgctggcgctggacgacaccgtggcgcccaaccgggcctgcggttgcttctcgttgaacgggctgctgctcgccagcggggaacaccatctgacgcccaccctgctttccgcccgcaattccggggataccgccggcgacaagggacgcgtcgtgggatatgcgtcctttgcattccaggcggaccagtgatgtcgcaccgcgacaatcccgtagcccaacaacaccgcataaccacacagtgaggagccagatcatgaatgacatccccgcgggtgcccgcgagaccctcatcgacatggcgcgcggagccatcgagcgccagttcggcatgaccgtgcaccaccgcgagcaggcaaccggcgagctggcgaagtggttggcgcgtccgggcgcgtcgttcgtcacgctgaccctcgacgggcggctgcgcggctgcatcggcaccctggaggcctatcggccgctgggccaggacgtgcgcgacaatgcggtgctcgccgccttccacgaccggcgcttcaccccgctgcgggttgccgaataccccggactgcacgttgaggtgtcggtgttgtcggcgcccgagccgatggaggtgaccagcgaggcggacgcgatccgccagctgcgtcccggcgtcgacggggtggtgctcaccgagggttcccaccgggccacctacctgccccaggtgtgggaccagctgcccgacccgcatgaatttctgtccacgctgcgcgagaaggccggcctggcccccgatcggtgggggccggacacccggctggcgcgctacgccgtcaccgccttcgaggacacccgatgacgacctcgcccacccgacgggaccccgcgggcacggacagggccgtccacgacaccgatgggctgcccggacgcaccgcccgctggtggcatgcgctgcccgacggacggctgcgctgtgagctgtgcccgcgcgaatgcaccctgcgcgacggccaacgcggcttctgcttcgtgcgcgcccgccacggcgacgagatccgcctggacacctacgggcactgctcgggcctggcggtcgaccccatcgagaagaagccgctcaaccacgtgctgcccgggtcgcgggtgctcagcttcggcaccgccggctgcgacctggcctgccgcttctgccagaactgggagatctccacggcccggtcgatgaccgcggtgggcgtgccggccatgccccgcgacgcgtcggcacgcggctgcagcgccgtggccttcacctacaacgatccggtggtgttcgccgagtacgccatggacaccgccagggcggtcaacgagcagcagatgctgtcgatcgccgtgacggccggatacatcaatccggaaccgcgcgacgagttcttcgcctgcatggacgccgccaatatcgacctgaagggcttcaccgagggcttctaccggcgtattaccggcggacgcctcgacgtggtgctcgacacgatcgatgccgtggtgcacaacggacgcacctgggtggagctcaccaccctgctgatccccggcatgaacgactccgacgaggagttgcgggcgatgtgcgggtggatcgtgcgccagctcggccccgatgtgccgctgcacttcacggcgttccacccgtcgaaccgcatgagggatgtgccgcccaccaccgccacatcggtggagcgggcccgccagatcgcactcgatgccggcatccacttcgtctacaccggcaatgtgcacgatccggccggtcagaccacctggtgcccgcagtgcgggacggcgctcatcgagcgtgatggctaccgggtggggccggtgcgcctggacgacctggggcgctgccgttcctgcggctacgcgttgcccggcatcttccggcgctgacggggcaccgggtgggcgctggacgcaccggcgatccctgccgcggcgacgcggtgcgcatgcggtggccgcgcccggtagtctgaacacgcccgaaaccgtcggtgtggcccagcagggtggtcgcgttgccgacatgcacgcaggagggtctggatggctgacaattccgatgccacaaccgcgaaggcggatggcggctcgcgacgcttcgcgcgtcccggcagccgacgcaggtcggggcgcaagccggcgctgtccttcgccacgctgaaggagaaggccggggccggacgtcccgagggtcccacgcgcaaggcgcagctgcgcatctcgcgggtcgacccgtggtcggtgatgaagacctcattcctgttctcggtggtcggcggcatcgcgttgatcattgcggtgtgggtgttgtggggcatcatcagcctgtccggtggcctcaacgccatgcagcagggcatcacggccatggtcggcgccgatagtggcggcgggtccaacctggccaactatgtgaccatgtggcgcgtgctggggttcaccgtgctggtgtcggtggtgagcatcgtgctggtcacggccatcaccacgctgttcagtttcgtgtacaacgtggccgccaatgtgatcggcggcctcgaggtgacactggccgaggactgagtgagttgagcgtgagggacgtcgtgcgataaagtctctcttcggtacgggggacaacctccccagcaccgatgggcctatagctcagttggttagagcgcgtccctgataaggacgaggtcactggttcaagtccagttaggcccaccaaagaatgtgcctctgacaagcttcgatgctctgagccctctcgacagggtacgaatcgggtacgaattccccgtcggtcctcgcgtacgcgcgcgtgagggcgagcgtgcccatgcgctcaccggcgtggctctcgcacggcctacacatagccctgacaccgcgaatcatgggtgacaactgatacccccctggggtatcagttccgtggggaatgccgctatgtctggtcgggtcgagggatacagtccagactttccccccatgttttgtggaaagggtgcccatacagggcatgcagggtgattggggttgggcgaccggaaaccgcgttctcccgggtccaggatcaccgaccctacaactacaccacccatgggatacgaggccgggagatctgcggcgctcggcccaaggcaaccattcgagcatggcagcgccccgggtagttcgcggtgaaccactcggggcggtgatgttggtcggtcagacggccacgtccgcagacgtgagctgttgactatgaccaaacggctggacatttgtcaccggcagcgcgtcggcatcgtccagctcgcggaacagatcggggtcgccgtcggccaggcccaggaggtcctgggaatccagctccccgcccaacgcgatcttgtgcgcagcccgggccacacctgcctcctgctgtgccgtcgcgagttggctggccagggcgccgtagagttcctggttctcgggcagcgccgggtacgcccggaccacggcctcggggatgtacgcggcctcgtcctcgggcagctcgtgggcgccgatcgtggccagggtctccagctcgtgggcggaggcggactgggcgattgtgtcgacgttcgccgtcccggctgcgatacgtgccgaaagccgctgccaggtcaactctcgggcgatgacggtctggggatcggacgacggcgccaggtccttggcgaactgatcgttgagagcctgctgagccttctcttcccgggccagcgccaccttcacctccgagatgacccattcgcgggttggcgcgatctgcttctctcggtactcggccaggccgcccgctgacaggctcgggttggtgtaggcatcggcggccttcttgcctgccatgaacttgcggaatgcatcggtgatgctagacatgatggacttcctttcgaggagctatctgatggttgggggtgtagttatgtgggatcgggctgcgcggctgggagatctgcgacggtgggcctccaatcgtcacttccgggccagtgccatacgcccttggcattccgcacgaggcccttggcggctatctcgtcgggtgtgaggcagcggcgcggtatgtaggggcgctgcgggtcgtggtggtcgtagtagtcaccaacccggtgcaggtctcctgccgaggtgcgcgagaacagctcgttgcagacggggcagagttctgtcttgagccctggaatcgcggggcgctgcgcagtcatgatggattttcctttcgagcggtggcctgctgttggtgatgttggctgagtccgagccaggggattcacaggtctttcttccctcagatggccgcgcctaagcaccaccgcgcccaccacgcccgcctcataaaggggcgggcgcggggcgcggttggtgcaaaccacgcccgggcgcggtcggggcgcggttagggcgcggggcgcggtacccctcaaattcacgctccgacttgggcgtttgccgccctcctggccaggtagatcatccggcgcggtcggaggaaccgcgcccggcccctcgaaccaaccgcgccggcccatcggggcgcggttcgagacgtgatttttcatcattcccggacccccagatcgtgcacttggagctcgggtgcgtagggcctgacgagcgtgtggagggtagcttgcccccggtggtcgcgttggacgtacccgtcggcaacgagactgttcagggcgtggcccttgcgggagttgctgccgcccacgtagtcgcggatcttgttcagcgacgccccgggggcctcgttgaggaactcggcaatgctcaccttcatcttctccagcgcttcgtccccgactgacgcgagcgcgggtgggctgacggtgaattcgacatgctccccggtgctgtctacgactacctcggctgcctgttgaacgccgtcgggacgccttgcaccgctgtgccctcggacgaatcccgggcggtccttggccacccacagggtgagcgcaccacgtcgcccacgtcccagcggctccctcacctcgaccatgtaggcggcgcccgtgagggcagagagcttggcttgaccaccgattgcccaccgaccgcgcgtttcgctgttcttggtgacatggtcgatctgcaccaccgccgcgccggtgacgtcggcgatgcggcgtggaagccgggttgcccagtcgatggcgtcggagttggggtccgtgccagcggttcccatcacggccatgctctcgctgacgccgtcgatgactgcgagtgcatatcgcttgttcagcatggccgcgaagtcgttggcgtcctccccctggctcgggttggtctcggggcgcacgtatgtgaagcgctgctcgatggctctccgtgtggcacccagaagcgtcaggcgttccgccagagaccccgcgtccgactcgaagtccacgtagaggacgaactgcccctccatgatgagccgggctgcctcgtactggacgaggaagctctttccggattccggttcgccgtggatgctgtgcgtgaggcccggatagagcaggcacacgtcatcggtccggcggagcaatgtcggccggggcggcgtgtaactgccgtttagatagcacgacaggtccacggcacgccagctgcgggggcgcgcattcttgggcttcccgctcatgtacgggccgaagtcttcgtccgcgctgggattctggggatgaagaggatcgtcgcctgccttctcgagcgcgtcgctccacttgtgcgccaccctgtcaggaccgaacccgtcgtccgtcgggcagcgattcttgaagtccttctcggcctgctcgatcgtgtagtccgtgccagagttagcagcgcggacgagctggcaggcgacagcgaagcatcccgagtcccacccgtcatcccgctcggtgcgatccccaggtgccagggcttcgagcttgtcgaggtcgcccagcacgcccgccacggtccggcggacgtagtcggcagagacaggatcctcctggccaggagtggtagctggagccggaacggtctccgcgtccttctcgggcgcctcggccagtatctcgtcagggctcagcatgcgtctgccccctcgtaaatctcgtaatcgttccagcgccgattgttcgagggcaggaacgagaactggatggggtcggcgcacgtctggtcgaactgctcggtgccgagttgtcggatgagcttgccagcgatgatcgtgtactcgtcgggcatcaccgggcgcgatagcgggatgatgatgcggtagcggggggccttgggcctgcttctccaggtgctgtgcacaaggcaccgcactccgagcgccagaactttgtcgggaagatcgggccaggccgcgtcggcatccagcaggaccgctgagcgggacaggatggtcgtcttccggcggtacacctctccggttagcgggtcgcgcatgagtgtgccgaacagccagcacccgcattccttgtggttcacgggatgccgaaccacctcgattatctcgtcccaagtcatggagccgttgacccagaccttggattccttgcgcggggcacgtgcgacggcatacatggttggctcagtcatcgggcgtcaccgccatacaggaactggcgcatgcgaattccgcccggtgttagctccgtgatccggacacgagtcggaagggcaatgcccagcgcctctgcctctgcacgttcaccccacgtcgtgtcgcgctcatagctatcctggccaggatgaaggatgaaccacgcttcatcgcgggcctgggcgcggtcggccttgaggcctgccgggcacgtcggctcgtggatcattcctccagctggagagaacgtcgctccgcaatcggggcaggcggtagccttgaaggcaagtcgattacctgatccaccttgagccgcccagtcgcccgctgggcggtttctctttgatcgagacattgcttaggccaccctctctacgagtgagaggacatcggccgtcttgacgcgcagagtgcgggtccggccgatgcggtagcacggcagctgaccgtcggcggtcaggcgcttgagggtgcgcacggagcagccgaggagctctgctgcttggggatagccaaggaacttgccgtgctgttgctggacggctgcgcggtcctgcggggtgaaggctgaggtggtcatcgttccaccgccgcatcgagcagcatggacgcgaggaagtcggtctgctccggcgtgaaggctggccccttggcgagcgcgtcggcaatgtggcgagccagcacagccgtgttgatttcgccctttgccttggccacggcggcagggtcgggcgttgggttgcccctgtagagccgagccaggcgggccttggcatccgcgatggcggggtctctacggtgatcgagattggggtcaatgagctgtcggtagggcctcttcggatgggtagatttggacatgcggaactccgggagatcgttctcgcggcttccgctggcgcctctgcgacgagacggcggactgtgttgccgatacccaatcccggcccacccgggatgccctagcatgatctgtccgccacggggaatcgcacccgtggtaaggctccgtgtatgtcactgaggaatgacgcggctacctggctggactacagaagttgagccacttcctccggcgactcagactacccaactttaggaaagtatacgccgattcaactagttccgctgctctgcaccttcgacagctccgacacccgatctgcgagctcagcaatgcggctgtgggcggcatgctgataccgcatggcgatctcgggatcggcgtgacccatgagtgtcatgagttccttggtggtggcaccggccacggcgtagttggtggcggcgaagtggcgcagcttatggaagctcaggtcatcgcgtcccagcaagtgcctggctcggtagtatccgccgccctgcttcttgacgttcccgtccttgtcgtacgtgggtcgatgaccgtacagctgccccggtgtgaggtagtccgtgccgggcgtggtcggcgggaacaggaggccatccttaccccactgcgcatatcgcttcaggtgttcgcgtaggtctggccagatgttgcgagggatgggcacgcggcgctctccgctgtcgctcttcggtgtcgtgacctgctggtgcccgtccaccgtcacaatgccccgagccacggagatgtagcccccggtgtcgttgagctcgatgtcggatcggcggagcgctgcaagctcaccgaaccgcaacccgcaccatgcggcgatcaggacagccgcgcgatgctgaggaggcatgagatcggctagctggccaacttgttcgacggtgaacagctcgacctcgggatgacgacggcccccgctggcgccccgcacgtgcacagggttggtggcgatgatgccgtcctccacagcgctggccaggatggagcggaagagcgcataggcatgagaccgggcaaccggcgcgcccgggtccatggactcgtaccatgccagcgtttgagcccggtctatggcggtgatcggcacgtcgaggaaccgagccagggcatgagcacgcatggcccggtagtccgctgcggtgcgggccttgagcggtcgcccacgaacctgccggtgctcgatccagcgcgcggagtagacaccgaacgtgatctggtcggcttcctcaaccgcgcggcgttgcgcgggaggagtccactcgtcacggtcgatgagaagttgctcgccgatgagccactggtccgcgagctcgaagctggcgaaagtgtgccccggcgtgtgcagcactcccagacgccagtagcgggccttgaatcctcggtccttggccatgatggtgcccagcgtggacttccgacggcgcttcatcgctgggccgtcctatggaagttgtggctcagttcgctcatttcggttcctcaaacagggtacgatccgggtacgatttgaggctagtttagcccgttgagcccgcttagcgctacaacgagagtggtttctgtggtctccatattccctagccaggcggcatatctcctcgtcggggtgggatcagcgatttccagaggctaacgggttcaagtccagttaggcccaccgcaccacgaaggccggttgacgggtgaaagcccttgtcaaccggccttttgcatgtgccgggtgcgtgcccggccggagggggagtccatgtcgcaacgagccgcaccgcatgcggtcacgccgtgcccggaggtgacctacgaccgcatccagaaggcggtgaagcgggccatgcgctcggcgcccgtcgagcacgagggggtgctggcgctgcagaccgagcgcgccatcctcaccttccagctgatcgccgaggcggaactgctgcgcgtggcggccctgatcggcctgcgcctgcgcgccgacgacagcgccgctgccgccatcgaggccatcaaccggctcaactcgcagtcggtcgacggcacgatctacctgtatcccagcgacgaccccggcacgcgcagcgtcggcatcgactccttcatcccggttgaccagggactcaccgatgcccagctcaatcgatcggtggcgctggcgctgtcgtcgatcggcgacctgatcggggccctccccgggccctcggactaaggacttccgccatcatgttcttcaccaggaaaacagtcgcgacgccggccatgacgcccgaccggctcgccgaggccctcgacgggctgcccgaggtgttcgtcctcgacgacgcagggaactaccactaccgcgacgacgtgggcattgcggtgcaactgggctacaacgacgattcgaccctgctggaggcgcatttcacgggcgtgcccgtggtgcaggagctgatgccgcgcgcgctcgacatggtgaaccagtggaacctggccgcgcgtcccgtgcgcgcctacctgggccgggtgtccgaggagttgcccttccaggcgccccacctgcgtgccatcctcaccaccggggtcggcgtcaccgacgggcagctggtcagctggttgcgtcgctgcgacgaagggatcggcgccttcaacgaccacctgcggcagttcttctcgcaggtgggcacgcccgggaactagtggcacccgggccagtggcgcccaagccagtgacactcaggtgacattggcgggccgcagccgggtggccggcaaccactcggcatagaagtcgtcgaccccacccgcctgggccaccaggccctcccaaccctgcggagtgtggcgccaccgggcgatcaaccccggcttggcgccgtcgatgagcaccaccaccacggtggggatgcgattggcatcgggtgccgacatggattggggggaacccggcgcgcggtacgggccgggtggcggctggggcggcggtgactgtgcgggccgcgactgtgtgggcggggactgccggcccgcccggtcgcccagctcgtcctccgcctgcgccgcagcgcgttctgccgcctcacgtgcctcggccgcacgggtattggccacacgctgcgacagtggcaccccggcgccgcgatccatacctccagacatgtcagtgagtgtagatgccagcgcctacattttcgaacacgcgttcgacacggacgtgctccggacagccctcccggcgcgataacaccatgtgagtcacaatggggagggaaccctccctccggccagtgctgaccggggtggacgcccggcgacgggcgtcagcgcgagggacccacgaccgtggggtcggtaggccctgcggggcggcggcccacatgggcagcggagcggtacgacagctgacaagggggaatgacatgcacgcaacggcaccggatgacgcgcgggttcccggggatgccgagcgtccggtgccccgacgccgggtgacgatccgcgacgtcgcacgcgcctccttcacatcggtggccaccgtctccgtggcgctgtccggcggcgccggcgtggccgccgagactcgcgcccatgtgcaggaggtggcagaccggctgggttggcgtcccaacaggtacgcgtcgaacctgcgcaagaccgactcgcggctcatcggcttcgtctgcgaggtggaacaggtgttccagatgggcctggtggactcgctgtacgttgccgcgcaacgcaagggcctggagctcgtgctcgcgggcgcgaccgcccaccacgacgagcgcacctgcgtcgacgaatcgctgcgcgcccggtgccaggcgatcatcctcaccggatcgggactgaccgaggccgagatgagcgagctggccggggccgtgccgttggtgagcctgtgccggctggtgcatgcgcccggcgtcaacgtggtggtctccgacgaccggatggggttggggcaggccgtcgaccacctctcgcagctgggccaccggcgcatctactacgccgacggtgggccggcctatccgttggcggcaagccgctcgaacgcctacctgtcggccatggacgcctgtgggctcggcgacaatgcacgggtgatcgagggcgggaacaccgccgccgacggggtgcgcgccgcgggacgcgtgctcgactgcaagccgttgcccaccgcggtgatctgattcaacgacgcatcggctgcagcgctggtgcgtgagctcaaccgccagggcgtgcgggtgcccgccgacatctcggtggtgggcttcgacgacacggagatggctgccgaaccgtcgacctgcccaccacgatcgtgcaggacccccggcggctggcagaggccgccatcgacctggtggccgtccggatcaatgggccgcaggggtcgggcgacaatccgacgtcggaggagttggtggtgctgcccaccgagttgcgcgtccgcaagacgacggccccacccaagcgctgagccaccggcagcggccacccgatggtccaactgcccgcagcttcgtcggaaagggccattaagtggtcaactgtgcggcaatgacgccgcacaactgtccacctagccgtccttcccgcaaggccctgcactcggctcggggcgcacccgggggcgtcgggcacggcgccggagcgacccatggcctgagcggcccggagcccgggcctgccagagcgctggtccggaccgcccccacctccgaccgcgccgcgacaagcgtcgatgggcaagtccgaaacgtttcggacgcccaatttgtcctgacatggcgcctttcgtgcaacggtgagcatgcgccacatcgcagtggcgctaaaaagcacaaggagacatccgtgtcagagaagacattgggcgttggcgtgatcagcctgggttggatgggccggttgcacacccgcggatacaagacattggccgagaaattccccgaactcgacgcccggatccggctggtgagcgtctgcgatcccgtggaggcgaaccaggccttcgccaccgagcacctcggcttcgcccgcgccgtcgccgggtaccaggaactgctcgacgaccccgaggttgacgtggtgtcgatctgctcgccgaactacctgcaccgcgagatcgccctggccaccgtggccgccggcaagcctttctggatcgagaagcccatgggcacctcggccgcccagtcccgcgagatcgccgaagccgccgcggccgccggcctggtgaccagcgtcggcttcaactaccgtcacaccccggccatcgagaaggcccgcgaggtgatccggtcgggacgcctgggccgcatcaccaatgtgcgctgctggctgatcgccgactacgcctcgtcgccgctcggcccgctcacctggcgctacgaccccgacaaggccggctccggcgtggtgggcgacctgatgagccacggcgccgacctggtgcagtacctgtgcggacgcatctcatcggtctccgcactcaccgacaccttcatcaccgaacgcccgatccccaccaaggtgggcgtcggccactccggctgggaggtctccgacgaactcggcccggtgggcaacgaggactatgtggccatgatcgcccggctcgactccggcgcggttggcaccttcgaatcaagccgcgtgtcagtgggcccgcgtgccgaatacatcatcgaggtctacggcaccgacggctcgctgcgctggaacttcgagcacctcaacgacctggaggtctgcctgggcgccgacaacgaattccagggctacacccgcgtgatggccggacccaccttcccgaacttctcgcgcttccagcccggcgccggcacgtccatgggcttcgacgatctgaaggccatcgaggcagcccagttcatcgaatcggtgctcaccggcaagcagctggcaccctcggcagccgacggatgggcggccgcagaggtggaccaggcaacggtggcgtcggcacgcgacggccaatggcacgacgtggcgcccgtgaccggcccgacaacctacgacgcatgaggcggggggaccaaccatgagcacaaacaatcagctcgacatccggctggacatgccgcgcgccgagctcgatgccgccgtcgccaaggtgccggccgggggcaagcaccgctccatcggcctgatcgccctggtggcgacgctcggatcattcctgttcggctatgacaccggcgtgatctcgggcgcactgccctatatgtacatgcccttcggggcccacggactggagatcaccgccagcgaggagggctggatcggcggcacgttgctggtcggcgcagccgtcggtgcactgatcggcggacgcctgtcagaccgctacggacgacgccacaacatcctgctgctcgccttcatcttcgcgatcggcgccatcggcacggccctggcacccaacatctgggtgatgtacccgatgcgcttcgtgctcggcttcgccgtcggcggtgcgtccgcaacggtgccggtgtacctgtcggagaccgcacccaagcgcatccgcggccgcatcgtggccatcgaccaggtgatgatcgtcaccggccagctgctcgccttcaccttcaacgcgctcatcgacaacgcggtgggtggcccgcagctggacgtggccggcaacacccagggccacctgcagaccggcacgcagacctgggacaatgtgctggccctgcaaacctcacagggcggccccttcgacccggccgcctggcactcattcgtcaacgcgctgctcgtggacggcggcaacggcatggcctggcgggtcatgttgatgctgtgcaccattcccgccatcgccctgtggatcggcatgcggttcatgcccgaatcgccgcgctggtacgccgcgaacaggcgctactacgagtcgatcggcgcactgaagcaggtgcgcgacccgcaccgcgacggcgaccccgccgacgagttcgacgagatgctcgtctcgcaccggcgcgaggagggccagaagaagggcaccttcggggacatctggcgtacgccatggctgcgcaagctgttcctggtgggcgtcttcctggccatctgcaaccagaccaccggcgtcaacacggtgatgtactacgcccccaaggtgttgcagtacgccggcatgggcacgtcggcatcgatcaccgcccagaccgccaacggcatcatgtcggtgatcggctgctcggtggcgctgtggctgatcggacgcttccgccgccgccagatcctcatcacctgcctgttcagcgtgttcgtcacgctcggcgtgatcgccctgctgttcgaggtgacgatcgccccggcaatcaccgagggtggacgcccgccgtcgtgggcaccgatggtgatcctggccatgatgggcctgttcatgctggtggtgcaggccggcaacggcccggtggtgtggacgatgctgggcgagatgttccccagcaaggtgcgtggcatcgccaacggcaccgcagtgttctgcatgtggatggtcaatgcactgatcaccgccaccttccccaccatgatggagggcctgggtggcggcatcacctacggcatctacgccgtgatcaacctggtgttcgcgttcatcctcatcaagatcatgcccgagacgtcgaacaagtcgctcgaggagatcgaggtgtacgcagaggcgcgctactcgtgacccacgccgtggggaggacgcactcctgctgaagatgtggtgggtggccggttcggggggatcggccacccaccctcatccccgaacccccgacgagttctcgcccaccccggtgatgacccgcgaacgcgcgacccgatcgggttgcgcgttcgtgcgtgcgtcaatgcccccgggaacagcgacgcggatcattggctgaagccatgcggattattggctgaagccgcgcggattactgggcgcgcaaccacgcgaggacggcccgcacccgtcggtgttcggtgccggtatcggccagccccagcttcgcgaacacggccgcgatgtgcttctccagcgtgccgacgccgatatgcatctggcgggcgatctcggtgttggaatagccctgggccatcagctccagcgactgcgcctcgcgggccgtcagcgcggccagcggatcatgcttcgagcgcagcagccccgacaccacctgcggatcgagcgccgtgccgccggcatggacgcgtcggatcgcgtcggtgagcgaatccagcgacgtcacccgctccttgagcagatagcccaggccgccctgcccgctggcgaacagctcctcggcatacaacgactcgaggtattgcgacaggatcaggatcgccaccccggggtggtcgcgacgcagccgcaatgccgcccggatgccctcatcggtgaaatccggcggcaggcgcacgtcgagcatcgccacatcgggacgcgcccggcccacgtcggccagcaactgctcggcatcgccataggcgccggcaacctcgaacccggcctcgtcgagcagccgcaccaggccctcgcgcagcagcgtggagtcctcggccagcaccacccgcaccgccgggccggacatcatgctcgattgctccaatcggtcaggggaatgcgcagggtgatcgtggtgggaccgccggccgggctggccagcgtgaagctgccacccaggccctgcatcctgcgggccaccccgtcgaggccgtggccgggcaccaccacggcaccacccacaccattgtcacgcaccctcacctgcaccgccggcggctgatcggtgcgggccgggtcggtgagcgtcgggcaggggccctgcgcgcccggattggtggcctgcggggagccggcgggcaacgcgtccaccatgatctcggcgctgctcgcctgtgcgtgcttggccacattggccaacaattccgaggtggccagcagcagcccctgggcgctggtctgctcgatgccctggggacggtcgagctgctcgggcaggtggttggtcacccgcaccggaagcgtggcgcgctccgccaacgactccagggcggcacccagcccgcgctccacgagcaaggggtgcaccaggccgcgcgacaggtcgcgcagctcctccagggtgtcctgcgaacggtcgcgcagctcgtcgagcatcgccgcggcccgctgcgggtcgtcggcaaggtgtcgcttggcggtgtccaggtccatctgcatgcgcagcaactgctgttggggcccgtcgtgcacattgcgctccaggcgacgcagggcctcaccctcggcgtcggccgaggccgaatgggcgtcggccagcttgccgacgcgccggttgagctcggagatgcgccgcgtgagttcgcggctcttgttggccgacagcagcgcgccacccagcaggcggtgcatccacaccagtgcgaaggtgagcaccggcagcgtgaccagcgcgatcaccgccagcgcggtgtcggcgatgtgcacccccatcgcggagcgcatcgacgccggcagcagcaggtcgcccagcgtgttgatgtcagcgctgagccgaatccaatgggtgtccagccaggtgctgacgccctgcgcgatcaccgccagccagaccgccaccaggctgaagctgaccatcgacacgatgaagttgacgacattgtgggccacggcgcgccaggcgtcgacgtccaggatcgcctgccacgcccggcgccacagcgtgggactaccgctcggggcaggggcgggtgcctcgatcggggtggttccggcccaccgcaggcgtgcgcgctcaccggcgccgacggcgcgtgcgcagatcaccagcgcccacaggcaggccatgcccaggggcgtgaggatcagcagcgggatgccggcggacagcagggagatgagcacgctgaaggtgaccaccgcccatggcaggccgccgagcaggtagccgagtcggccgggcacatggcgccacgaccacaccccgccgagcatgagcgacggcggttcagttggcgcatcggatcgggtcacggtggggtctccgttcgcagtgcgcagggaggctggggaaccactgattgaggtcatgcctccactcttgtcgcgcggggctcatcctagaaggtggttggcctccgcatcgggtgggggacagcccccatgtcgcggtccgggccggttcaggcgactgtccgatctggtcggcggcccccaccccggcaccggacgcagcagggtcccggaccgatcggcccgggaccctgctggtcacgacaaggaggcgtcgagtcagctcgtcgccacgtcgtcgggcctcggattgaacttcgggtggtacgacaggtcgatgcccttggtctcgggcagcgtgaggatcgtcgccgccgatatcagcaacagcacgatcacatagatcacgaaccgattcggcgtggccgcccaggccgacatgatgtagggcgcggtgccgccgaacagggcgatcgcaatcgcatagggcacgccgaacgcggtggcgcgcacctcggtggggaacatctcggcgtaggccgccggggcaatggccaggtaggcacccagcagcaccagcatcacgcagatggccaccaccagacgccagaactcattgccaccacgcaccatgttgttgagcggcacatagagcacggcgcagccgatcatggcgatcagcatgttggtcttgcgtccgaaccggtcggagaacatgccccacagcggcagcgagaccatgaacaccaggttgccgatgatggacgcgccgaaggcgtcattcgtcgaatagcccaggttcttctgcgccaccgacgcggtggacaccgaccagatgtagtaggcgacggtgaggccacaggtcatgccgatcacctgcagggcgatcttcttgtgcttgagcacctcgcgcatcaggctcttcttgagctcgccggccttcttctcgtcctcgaaggcctcggtctcctccatgcgttcgcgaatccagaaggcgaacacgcccaacacggcaccggccgcgaacgggatgcgccagccgtactggttcatcgcgtcggagcccagcgtgtcgcgcagcaccacaccgaacagcaggcccagcgtcaggccgaacgaaccggtgacgtagatggcgctcgcccacaggccacgacggttgggcggggccatctccgacaggtaggtctgtgccgacggcagctcacctccgtgcgccaggccctggatcagccgcgccaacaacaggatcagcgacgaccaggcacccacctggtggtaggtcgggcacaccgcgatgagcagcgagccacccgaggcgaagatcacggcgatcgccagggcgtgcttgcggccgatgcggtcggccagccagccgaagaaggcaccaccgaagggacgcgccacgaaggcgacggcgaagatgcccatcgtctccaggaacgccgacgtggggtccttcgagctgaacagttcgcgggacatgtagatggcgaaactggcgtagatgttccagtcgtaccattccagcgcgttgccgacgccggtacccagcagggtacggaacgcggattgacgcggtgccggcggcgcggccgcgggaatcgtggtcatagttgggccttctgggtactagttggcgtcagcgagcgtgcgggttgccagctcggaaagcagggcggctgcgtccaacaggacggagtcgtcgtacagggcgaacggcgagtggttgccgtgcacctgtgcggggtccttgtcgggcggggtggccggcaggatcgcgaaggccccgggcacctgctcgagcaccagcgagaagtcctcggcggcgcccatcgggttggccatctccacgaagtggtcggcaccgaacaggtcggtggcggtcttcgcgaccagggcggcaccctcgtcgtggttgatggtggccgggtagaggttggtcagcttcacattggcggtgacgccgtgcgaggcggccacgtcggtgaccacgcggggcaccatgtcgaacagctgctgctgggcctgcttggagaaggcgcgcatcgtggcctcgatggtggcggtctcagggatgatgttgcgtgccacgccggcctcgacgtggccacaggtgatcaccaccgggtcccagatgttgaagtggcgggcgatcatcacctgcagggcggtgatcacctcggccatcgcgggcaccgggtcaacggccaggtgcggcgcggagccgtggccgcccttgccgacgaattcgaagtcggccatgtcggacgacgccatgatcgtgccgggacggcagtagaagatgccggccttgtcgaggcccgaccacacgtgcaggccataggccgcgtcgacgcgcttgccggcggcgtcgagcacgccctcggcgatcatcagttcggcgccgcggtcgctctcctcaccgggctggaacatgaacaccacgtcgccgggcagctcgtcgaccttgtgcgacagggcgcgggcggcgcccaccaggccggtcatgtggcagtcgtggccgcaggcgtgcatggcgccgttggtgctggcccaggccagtccggtctgctcgaccacgggcagcgcgtccatgtcgccgcgcagcagcaccgtcctacgggggccgttcgagggggccttgccgcgcagcactgcggtgatcgagctgagcttcttgcccagggtgatctccagcggcagtccctcgagcgccttgaggacgcgctgttgggtctggggcaggtcgagaccgacctccgggatctggtgcagttcgtggcgtagcgccaccagctcgtcctggatggagacgagatacgggtctgggccaagcggcatgtgttgttctcctcgatgattcctgactgtgcctattcgagcaccgacgggacccctgtggcccgttcgcacagccttgatgcgtagttacacggtgtttacatgcgccgttaggctattgcgcccgcttcgtgggatctgccgcgtccattgttggtgcgggcgggtgtgggtcggctcgggtgtgggtcggccgtcgcccgctccggtcggttaggtgggcacctgtgcggcgtcattgccgcacaactgtccacttaggaccgaaccgcggtgggtagtgggtgcaatcggcactcagggagggcctttgcagggcagatgacgcaaaagtcctccctgaagcgcggtggaccaccagggccgacccgaaaccccacaaagtgggcacctgtgcggcgtcattgccgcacaactgtccactcagtggtggtgggccggtggtggccgacggcgatgcagcgggtggacgcgggtcgccggcgggggatggcatttcgccgacttgggatgatgggtgccgtgaggcacttcctgtgaccggtaccgatacgaccggctcccccgcggccggcacccccgcaaccggacatgttgcagctgggcgacatcgtgcagctggacaacgtgcagccggaacccgtcgggcccgctggtgggcgacgttgtggccgcacggcctggcgggtgtggcacctgaccaggacgccaccctgatcgaccttgcgacgctgcgttccagcggtgccgtcctgcgcgccatggtgcgccgcgatccactcaagttcagcctcggggcactgggggccgcgctggtgagcgtggcgaatgtgtccatcccgctggccatgggacgcgccgtgcaggtgggcctggtggaccaccggttcagcgggttcgcgctgtggctgggcgtggtggcactggcctatctgttgcgtgcgggcgccaccaccctgcgcctgcactcgaacatgtccgcgtcgatgctgcagcacgacatgcgcgtgcaggccctggcccgcaccgtcgatcccaccgggctgggctcggcccggcgcctgcccggcgacctgctcaccgtgatgatcaccgacgcccgcaccacctcgcgcgcgctggtggcgctcaccggcgtccccggccagctggtcacgctgatcggcgcgctggtggccctgctgctcatcgattggcgcctgtcggtggccgtgctggtgctcacccccttattggtgctgatgtcgctgaagggcctggcaccgatccaggagcgcacccgcgccgagcgacgcgccgaggccgccgctgccggcatcgccgccgacctcaccgagggcctgcgcgtggtgcaggggctcggggcgtcggcccgcgcgtcgtcacgtttccgcaccgcgagccagaccggcctggccgccacgctgcgcacccgcaccgcccgcggcatctacaacgccgtggtgagtggtgcggtcggcatcttcaccgcgctgctcaccctgctgggggccgtgctcgccctcaacggccagatcaccatcggcgcgctggtcaccgtcgtcggcctcggccagacgctcgcccctccgttgcgctcgctgggcgtggacacggcgtccaccctggcgtcggcacgcgcctctgccgaccgggtgcgcgagctcgtggccaccccaccggcccagcagttcggcaccgccgacgaaccgccggccggcccggtgcacctggagctgcgcggggtgaccacgccgacgatcacggtgccgctcaacctggccgtgccgcccgggcgccaactgggcatggtgggtcccgaaccggtgatcgacgagctggcggccctggtcgcccgcgaacgccgcccggccaccggacagctgctggtggacgcccgtcccgccgccgaatggagcgacgacggctaccgcgcccgggtgctggccgctccccgcgagcccgaactgttcgacggcaccctgcgcgagaacctcaccctggcccccgacggcccgctgcaggccgaggccgacaaggccctggacgccgccatctgggcgtcggcaagcggcgacaccgtggccggcctgcctgccggcgtcgacgagatgatcggcgagggcggccaggaactgtcgggtgggcaacgccagcgcatcgccctggcccgcgccctgctgcacgccgacgacctgctgatgctcgtggaacccaccaccagcgtcgacccgatcaccgaccgcgagatcgccgagcggatgcgtgagttccgcgccggacgcaccaccatggtcgcctgctcgtcggccaacgagctggcgcaggccgacgaggtggtcttcttcggcgaggacggcgcgatcatcgcccgcggcccccacgaatcgctgctggcgctcgacgcctaccgggaggtgttgtcgtaatgcgcgcccatggtccggtctggctgccgcgcggccccgcgaaccgctggctgcccctggcgtccggacgccagatcgctgcgcaggtgcgctcccattcccacggcctgtggcggtggctcgtgctggccgtggtggccatgaccatctcggcgctcacctcgctggcgctgccggtggccaccggcatggtggttgaccaggtgcgtacccacggtccgctgagcgggctgatcgcgccgggcgtcatggtggtcacggccgtgatcatcggagccgtcgcctcgggtgccggccaggcgctcaccccgtcgtatttcgccgcggtgctggcccggctgcgtgaggacatgctggcccgcgcgctcgacctcgaccagcagctgatcgagcaggccggcagcgccgacctcgtggcccgcgtgggtgacgacgtggcgaccgtgcgcgattcggtgaacgccggactgccgcgcatggtgaacacctccatcctgctcgtcgtggcggcgagcggcctggcggcgatgagcccactgttcctgctgccgctggccgcgggggccgtggtgttcacggcgtcggtgcgctggttcctcaagcgcgccccggcgatctaccgcaacgaacgccaggcgtcggcccgccagtcgcaggacatcctgtcgacgctgcacggcctggatgccgtgcgcgccttcgggctggccggcctgcgcaccggcatcgtggcccgcagctcgtggcaggcggtgcgctgggaactgcgcggccgcttcctgtccaacgccctggtggtgcgcctggtgatcggcgaggccgtggtgatcatcggccaactgctcgtgagctatccgttggtcaccggcgggcacgtgagcgtcggccaggcgtcggccgccgggctgttgctgctgtcattgatgggtccgctgcgcttcctgctgatgttcatcgacgacctgcaggccgcctacgcctcgctgcagcgcatcgtgggcgtgctgggtgtggacgcccaccacgcgccacagggggacgattcctttgctgctccgacggacggagcaggggcagggcagcccggggcgggttccccggcgggcgcgcgctcgggggtggggccctcggacaccggccccgtcgagagccggcccgtgggtgttggccccatggacaccggtgccatggaagcgggccccatcgaagcagcgcgcatcgaagcagggcgcatcgaagcgggccccatggaaaccgggcgcatcgagatccgccacctcggcttcgcctaccggcccgaccagccggtgctgtccgacatcaacctgaccatcgcgccgggcgagcatgtggcggtgatcggtgaatcgggcgccggcaagtcgacgctggcgaagctgatcgccggcaccctgtcgagctcatcgggtgaggtcgcggtgggcgcgcgtccgggcacccggggccccgccgtggtgctcgtctcgcaggacatccacaccttctcggggtcgcttgccgacgatgtgacgatgggtgcccccgccagcaccgtcgatgaccagctggccgccctggcccgcgacgccctcgaccgggtgggcgccgactgggccaccgacctgtccatggtcgtcggacgcctgggcaccgcgctcagcccggcgcaggcccaacaagtcgccctggcccgcgtgctggtggccgatccggcgatcgtgatcctcgacgaggccaccgccgaggccggcagtgccggcgcacggatgctcgaccgggccgccgaccaggcgatcgccggacgcaccgcgctggtgatcgcccaccggctgtcgcaggcggcgcacgccgaccgcatcgtggtgatggcccgcgaccgcatcgccgaggtgggcacccccgatgaactgctggcccgcgacggcgagttcacccggttgtggagggcctggcaggccgagcgctgagcggggaagggcccggcacgccccatccacaggccgggaggccactttgacccctccctgcacatttgctatgtcgcgcccgcgcgtgcgcgcacgtatgtgcactgcgtgcaggctgatcacatggtttccgccggccctgcccccggcccagaacccgctgatatacaagaaacaacccggcaacgaagccggagattgctcgtcaaaggagaagagcatcatgcgtatcggagtgcctacagagatcaagaacaacgagttccgcgtggcgattacaccggccggcgtccacagcctggcggcgcacggccacgaagtattcgtccagaagggggccggtgagggctcgtcgatcaccgacgaggagttcaccaaggccggcgccaccatcctcgacaccgccgagcaggtctgggacgacgccgagatgatcatcaaggtgaaggagcccatcgccagcgaatacggcctcatgcgcgagggccagctgctgttcacctacctgcacctggccgctgaccgtccgctcaccgaggagctgctgcgccgcaaggtgacgtcgatcgcctacgagacggtcgagctcgccgatcgctccctgccgctgctggcccccatgtccgaggtggccggacgactgtcggcccaggtgggcgcctacaacctgatgcagccctatggcggacgcggcgtgctgctgggtggcgccaccggcgtcaagaagggacgcgcggtggtgctcggcggcggcacggcgggcttctgctcggcacgcgtgctcgacggcatgggtgccgacgtcacgatcttcgacgtcgacgcggcccgcatggagtacatcgaggacatcacgaagggcgatatccacaccgagtactccacgccgttcgcggtggaggaggcctgcgtgctggctgacctggtggtgggctcggtgctggtgcccggggcacgcacgccgaagctggtgagccacgagctggtcaccaagatgaagaagggctcggtgctcgtcgacatcgccatcgaccagggcggctgcttcgaggactcgcatccgaccacgcacgccgaccccaccttcaaggtggaggggtcgatcttctactgcgtggccaatatgcccggcgccgtgccgttcacctccacctatgccctcaccaatgccacgttgcgctacgcacagttgctggctgacaagggctgggaagaggccattcggctgcgtcacgacctggcgctggggctgagcacctacgacggccagctgttcaccggcggcgtcggcgaggcactcggcatcgacgtcgagccgctgtcgaccgtgctgggctgagccgggcgcgttcacgacatgtctcctccaccggggggcctcctcgcggaggcctcctgagggggagtcccctccacagcaacaagcaatctcgttctggatcaatctcgttccagatcaatgttgttccagatacagtcccgtgcggcccacgccgacatgggacgacggccggggatggcccggcgcgccacggatggtgagccatgcgtcggcccgtcgggacccacccctccggtgacatccaccggcggccgccacgtggtgaggtgatgggtcgggcggccctctgggcagtccccccgccatggcttccaggacctcttgtcgcaccgcgatcggtcaatcctcaagggagaggttttgtcatggcactggattggactggtataccacctgaggtggaccttcctgacggtgaacctgaactgagtcgcgggctgaagaatcgccatctccagctcatagccataggtggtgcgatcggaaccggcctgttcctgggcgctggccgcaccatccacctggcaggcccgtcgatcgtcctggtttatgtgatcatcggtttcttcttgttcttcgtcatgcgcgcgatgggtgagctgctcctgtcgaacctggcgtacaagtcgttcgcggacttcgcgaccgacctgatcggcccctgggccggcttctacatcggctggacgtactggatgtgctgggtggtgatcggcatcgccgacaccacggccatctgtggatacctggccctgtggttccccgatttacccaagtggatccccgccctgtgcgtggtgttgctgctcaccgggctcaacatggtggcggtgcgggtgttcggcgagctggagttctggttcgccatgatcaagatcatcacgatcatcgcgctgatcctggtgggcgcctacctggcattcacggccttccagccgcctgtcgcgggcgcgccgcccgcgtccatcgcgcacatgtgggatcgcggcgggttcttccccacgggcttcgccggattcatggccggcttccagatcgcgatcttctccttccagggcattgagatggccggcacggctgctgccgagacggccgatcccgagcacaacctgccgaaggccatcaactcgatcccggcccgtgtgctgatcttctacgtgctggccctgatcgtcatcatgtcggtgcagccctgggacctgattgatcccaacaacagcccgttcgtcgagatgttcagcttcatcggggtgctgatcgccttccacgtgatcaacttcgtggtgctcacctcggcggcgtcgtcggccaactcgggggtgttctccacctcgcgcatcatgtacggactggcgcgcgagaagaacgcgcccaagcggttcgcgaagctgtcgggacgccacatcccgcgcaatgcgctgttcctcaccgccctgtgcatctcgccgtcgatcatcctggtgatgttgtccgattcggtgatggacgccttcagcctggtggccggcatctcgtcggtgctctacctgtcggtgtgggggctgatcgtcgcctgctacatcgcctacctgcgcaagcaccccgagcggcatgccgagtcgatcttcccgatgccgctggcgcgcatcatgccccgggccacgctggtgttcttcgtggcgatcctggtggtgctgggcttcgcggaggactcgcggatcgcgttgttcttcgcgccggtgtggatcctgttcatggcgctcatgtaccgcttcctgcgttcgacgcgtgccgaggccgagccgatcgacttcgatgcggagcgtgatcgggcccgggagctggttgagcagcatgtcaccgagaccggcggcaagggtgcctccgagcggctcaagaagaccggccggcgcaccctggactgatcgcacgcccggtgggcggcagggttgcgcccacgacatgtgagcccggtgggcggcaggctcgcgcccaccacaagtgcacacagcattcgtccccgtcacctggcgttcaccaggggcggggacaaatgctgtgttgtcggggaaattcgtgttgtcgaggatgggtgtggggcccgggttgcctcagtccgggccgtcccagatcccgctgcctcagaccagggcgctgcgctgctgccaggaatcccagtcgtagacccagcagccgactccgtcgccgggctggaacgaggggccgccgccggtgaactccaccgggtcgcccacctgggtgaagctcatcagccaggccgcctcggtgggactcacgttgacgcagccgtggctggagggcgtattgccctgctgggccaccgaccagggcgcggcatggatgaactcgccgctccacgtgacccgctggcagctgtcgaccttgagcttgtagccctcggcactggtggccggcacgccgtaggtggacgaatccatgatcatcgaggtgagcttctccatgatcaccttggtgcccgacagcgtcggatgtgccgcggtgccggtgctcaccggcaggttcttcaccaggttgtcgttctggtagacgcccatgtactggctcgagttgttgcaacgcagcacgtgggcctcgccgaagctgatcgagtagttcgtgtcgtcagcaaggtagaggccgtcacccaccacgagtccggcgaacgccagtgacaccttcgcggtgctgccggcctgccaataggtcttgggacgccacatgaggatgcggttctccacccaaccccacgagccctcctgcaccggcgccgtggtgacggtggcgtgacgctcgatgtcggcgcggatcgccttgtcggtgatcgggctgttgaactggatgtacaccggcatgcccacgcccagaccctgctgcacgtacaccggcgaatagacgatggtctcgaccttcgcggtggtgaacgacgcggtgagcgtgtgcgggccgtccttggcgtcggtggcctcgacggtcacgttgtagctcgccgccggccagaaggcgcggtcgcaggtccaggtgctgccgttgagctggccgctgtaggcgttgccgttgctgtcggccaccacgatggacttcagggtgccgtcattgacggccacggtgagcgcgtcctgcggtaacacggcgtcgaggccgtggggggcggtcagcgacagcgtgggggtggcgggccccttgctcgacgccgatgcgccggttgagccggggcgcgccttggaacaggcggccagccccaccgcgccagcacccaccgcgacggcggcaagtgcccctcgccggctgaaccggctggtggggtgaaggcgacgtggcatcggaactcccgaacatgttgcgccggcgggccggcttggagatggacgattctgcgggggtgatcggcttggcgggtccgaccacacaggtgcggggctggacctttcgcatcccggtgaatgcagtgcggcgggagatgtcacccgcctgagcaatcaagccaagagtgtagctcgtggcacttccatttctgagacgccagcggcttgttcgccacaggctgttattgaggcaggtcgccggcgtgctgggccagggatcggtgggtggccgccgcaggccccacaatggagccatgtcaaggggtgtggaaaacctgcgtgcggtgcggcttgtggcgtccggacgcgtgcagggcgtcggcttccggtggcaggcccgtcagcaggcccgcgcgctgggtatcgacggctgggtgaagaaccgcggcgacgggcgtgtcgagatggtggcccagggcgagcgcacagccgtcggacggttcatcgcctgggcgcgcagcggccccggttacggatacgtggagcacctcgaggtcaccgacgagcccgtccggggcatgaccggcttcgacgtccgctgagttcggacgcaccgggttcgggtgcggggttcacaccgcccgtcgctcacagcgcgcgggtggtccactcgctgccggcgtcggtgaggcgtgccaggccgccggtcaacgccgcgaccgcctcgcgggtcaggtcgtcctcgccggggacgtgcgccacctgcacgatgccctcggtggacgtccagcgcgtcgccacgacgtgcagcgacgagttgcgcagggcggcctcgatggcgccggcctcggccagcggcaggtgcacgtcaaccagctgcatgcgctggcgcaccacgaagctggcccgcgtcagtgcctcactcaccgcgccgccatatgcccttgtcaggccgccggcgcccagcttgatgccgccgaaatagcgcaccaccaccgcgagcacgtccgacaggtcccgccgtcccggcgccgtctggtgtgccacgagcgcctgcagcatcggtgcgcccgcggtgccggccggctccccgtcgtcgctggtgcgcgcctcggtgtgcccggcgccgagcacgaaggcgctcgggcggtgccgtgcgccgtagaactccttgcgcagctcggcgatgtgctcgcgggcctgctgcgaactggacaccggatacaggcaggcgatgaaccgggaccgcttgatctcctgttcattgcgcatcggtgcgcgcagcgtcacgaagtggtcgcccgacgacgcggactccaccgactgcgacatgacacctccacgacgacaactcccggccaccacggaacgtctccccggacctgatgggaggtccggcgtccacagatccggcatccacacacatcgtgtcatgccctccccggggcgttagcgtggacgcatggcagacatcaccccactgttggcagaccgctggagcccccacgcattcgacaagacccacgtgatctccgaggaccaggtgcaactgttgctcgaggcggcccgctgggcaccgtcggcaatgaaccgccagccctggtcgttcgtggtcggcgtgcgcgacgacgacgtcttcgcccgcctgcgccccgccatcgagggcttctccgactgggcgctggacgcgtcggcaatcatcctcggcgcctatcagaacgccggaagtgagcctgactacgccctttacgacctcgggcagtcgatggcccacctgaccgtgcaggccgaggcactgggcctgcacgtgcgccagttcgccaccttcgaccgccccatggccggacgcgccttcaacatcgccgcgccgtgggagccgatcatcatggctgcggtgggcctgccggcacccggccagaagcccgaggggcgcgcccgcaagccgctcagcgagctgaccgcctggcagtgagctgatcctcggccggcacccgccggtcacctgccacacgcctgcccacgggcctgcgtgggctccgaacacgcccggccagcgaccgcccctgcggacgacgggatgccacaatgggcggccggggtcgcgtccggccccgatcgaggatgcacggcatcgagggtggtcggcctgttgggagaagagcgcgtatgagtggtgggactgctgttggttcccaagaatttcccccggtgggcacgttcccacaggaggacgaactccccccatcgggcacgacccgcaggacgcgcgatgcgtcgtcagcggacctcgtggccaatggttccgcaaccactgacccctcaccggcccctcgccaccgcatccggcgtcggctgatcccgctcgacgggcacggcgacatccggttgggcgtcctcgccgcactgctgtgcatgatcggctcgtggtacgtgtcgacgtggctcgacgagtcggccaccgcgcacatcatcagctatccccccgcgcagatgaatgggctgttcacctggaccgaccttgtgtacgcgccctactactacctgatgcactactggacggcgctggtgggcatcaatccgttcaccctgcgcctgcccagcgtgctggcggtcggcgtcggcacggccgccatggccgccactggccgggtgctggtggcacgtcgtgtgtgttgggtcggcacataggtgacaggtgatgggtgacacctgagtcggcacataggtgacaggctcgggcatgtcgaagaaccatgttgcggtgatgtcggtggtgtctggatcgatgagcgtggcgcaggcttcgcgggagttcgggatcagtcgtcagcacgtgtatcggttggtcgctcgttatcgggccgagggccccgaggggctcgagccccgttccagggcaccgcggtcgcatccgaaccagacgcccgcccgggtgcgtgaacggatcatcgcgctgcgtcgacagttggtcggcgagggcctggacgcgggtccgctgacgatcgcatggcacctggagcgagacggggtccggcccccggcccattccacgatccgcaggatcctgcatcaggccgggctggtcaggcccgaacccgacaagcgtccccgttcatcattcatccggttcaacgccgacctgcccaaccagacctggcagtccgatgtcacccactggcaactggccgacggcaccccggccgacatcatttcctggctcgatgaccactcacgttgcctgctccacatctcggcccaccgtgccgtatcggtccacaccgtgctcgacacgttcaccgccacgatcgccctccacgggccaccggcctcgaccctgaccgacaacggcatcatctacaccacccgcctgctgggaggacccaacagcggacccaaccgcttcgagttgttcctggaggccatggggatcgtccagaagaacggtggaccccaccggcccacgacccagggcaagatcgaacggttccaccagaccctcaagagacgcctgaacgccaaacccgacgcccacgacatcgccgacctgcaaaccgtgctcgaggacttccaggacctgtacaaccaccgccgcccccacacctcactggcacgacgcacccccggcgacgtctaccgggccagccccaaggaccggcccgaccccaccggcccacgacccgtccgcgactccgaataccgcgtcaagcacgtgcgggtccccagggccggcgtcatcaccctgcgccaccacggcgccccacacgccctgggcgtgggcgccgcccacgccggcatctccaccgtgatcaccctcgacgcgaccaccgtcaccgttatcgacccgacgaccggacagatcctgtcgacccaccacatcgaccccgaccgacgctactggcccaacacccaacgcccacccggacgatggccgaaacacgatccctgagctgacacctatgtgccaactcatctgtcacctatgtgccgactcatgacaggtggcacgtcgtggccagctgctctatgccgcctgcttcgcgctgcttccccgcgtcatggcgatgggcatcgaggcgcgtccgtatgcattcgccgcgatgttcgtggcctgtgcggtgtggttggtggtgctcatcgggcgacgtccgacggcatggcgcgtgatcggcctgaccgcggcgatggcgcttgcggtgtatgcacagatgtacgcggtgttgccggtggtgggactcaccctcgtgggcctgctgacgatccggacgcggcaccgctggctcgtggcggcggccgccgtggcagccggcacgctctgcctgcccttcggggtggccgccgtgggccagttgaggcaggtggggtggatcgccgacctgtcccacgactggttcgaccatgcgctcgtggagtcgtgggcggcgtcgcgcacgaacgtgaacgtgacggccaccgacctggtgccgcacgtgatcgcggtgacgatggccgtgctggccgccctgctggtggtgttggccctggtgagccgcttcaccggcaccgccgccgagcgggcaggccgccgcgcgggcgtcgcccggatgctgtgggcgatggtgccgatcgtgctcaccgtggtggtgttgtggacctattcgctgctggccaccgatgtgctgctggcgcgctatttcacggccgtcgcgccgttctatgccgtggtgttggccgaggcgaccatggcattgcgctgggggcgggcgcgcgtcgtcccggtgttgttgctggtgggtgcgctggcgctggccggattccagcgccgcccctacgcgaaggtcacctgggaggactattcgctgcttgcgacggtgatgcgcaccgaggcccagcccggtgatggcctgctcaccgaacgcaatccgcagcccaacgagaactaccaggtggcgcttgcctgcgatccggacgccttcgcccacgtggtcaacctggcccagcccaacaagccgccgctggacggacccttccgcagggatccgccgcgcatccggctggtcacctatccccagctgccgcagcgcatctggctggcggtgccgttcggccagtggagcgaatacggccagcagctggagcacctgggctaccagccgacgctcaccgagcgcggcccgcagggcgatccgggtggccacgccatcacgctgtggcaacggtggtgatgcattgcagcccggcggttccggcggtcccggtagtcgcggccgccgccggcggtcagcagtcggccgagcgctgcacccacagggtggagctgcccgccaccgcgaagcgggggtagtgcaccgtctccaccaccgccatgtcgggtagcggggattgcgagaccgtgtaacaggcccgcgtgtcggcgaaggacgaggtgtagccgtgggcacccaccacacccgagccggtggccatcggccgtgacgagtgccagcccaaccattcgaagccagcgtcgatgtcggtggcggacacgccgcgggccacgagtcgttcggctgcccgccactgggccccgtcgcgggccagtgtgctggcggtcaccgaccagctcagcgccgcgacgaccaccaatcccacggcaccggcccaccgggaggtcgtcggcacgctggcccttgaagggttcgaagaccgcgcaggggcggcggcccggggagcggccgaggcttgcagcgaggcagcggacgtcgcagccggccgtgccgccagcgatcccaacagcggcccgcacaacagcggcaccagcgtgatcaggtagcggtcgtagatctcctggccgatcagcgcctgcccgagcgtgcccgccaccaacaggccagccgctgccgcggtgagccgatcgacgcgccgacctcgcggcgcagccgtctgtccgggggtgtgcaggcgtgcctgcaccgccgtgccgacgagcaggcccgccgacaggcaggtgagcaccagcaccgcgttccacaccggcgccgcaaagatcgtctgacggccgtgttcggcgctggcataggcgccaccgggcgccaggtaattgggcaggtaaccgatccgcgccacgaacaccagcaccgcgcacagtgccgtggtggccagtgccacgaggcgcgcgggccatccccagcgccatggacgagccaccaaccccgccaccggcagcaggaacagcgccagcgtcaggccgccggccagcaccgcgcgtccggccgcagccgggctcaactgcacctgcggatggtcgcccagcggaagcgactggcgccacaattcgaaggccccgatggcgccgaggcaggccaccgacaccagcgccgcgatggggcgtcgcacacgtcggtcgaggaaggcgacgagcagcacggcggccagcgcggccagcgtctgctcgcggatggtgacgccccacacgcccagggcaccggccagccacagcagcccggtcgaacccctgcggatggcgcggtcacccacggcgaggcaggccatgaaggccgccgcagcggggatgtcggccatgaacgaggtggccagcagcccgaacatcggcagcaggcccagcgcggccgttccgaacagggcgcggggagcccccacccgcggccgcagccagaaatagctcgccaccagcagggctgcggccagcagtgcgacgaacagctgttgggccaccacccaccgcgccagcggcccgaggggcacgatctgacccagcagcgcgccccggttccagcccaccagcgtgatggtgccgtgcaggccgaagtcgcgggcgatccgtgaatgcgaccaggcgtcgttgtggggaatcgacaggctcccggtgagggccgccagtgccaccgggacgcccacgcaggcgatgatgatcgcggtcagcgccagggcatggagatgacggtgcacccagctggccgtgtggttcgcaccggggctgtccgacgatgcgtcgctgtccagtgacccggggccggagggcggtgtggcgggcatctgcgggggtcgtccttcctgcgtccggccgtcgcgttcacgtggcagccgtctgggctggatcttaccgagcgcggtgcgtggacgaggtgcggcttgtggatgcgcggctccaagtgggcacctgtgcggcaatgacgccgcacaggtgtccacttaacgtcgatactgccgtcatcggggccgcacacggtgcgccccatgccgccggttggcccgcggtgcgtgtgccagactgggcgggtgagggagcgcgcgtgagccggggcgacgatgtcagcatcgaccccgggcaggactcaccgggcctcacccggcgcaatgcctccggggtggccatcgcgtcactggtggcggcgctgagcaatttcgtgctcatgttcgtcggcacgcgcaccctgtccgacgccgccggcaccgagttcctggcgttctggtcactgctgaccggcctgttcggcgtgatctccggggtgcagaacgagaccacccgcaccgtcggggcggtggcgcagggacgcccgcccggcgtccgggcactgtggccagccctcatcgtcggtgccggcgtggccgtggtcgtcgccgccctgtcaccggtgatcgcgcgccgggtggtgccgttgtcggcgtccaccgcggtgccagcgctcatcgtcatcgccgtcgcctatgccgcctatgtcaccctggtgggtgcgttcggcggatgcggctggtggtcgcactatgccggcctgctgtgtgccgaggtggggctgcggatggcgctggtggtggcggtgttcgtggcgggagccagcctggcgggctacgagttggcatgcgtgggggccacggccgtcctggtgatctacctggtggcgtcgccgcgcgcccgggcggccatggccagctttgccgacgccgggttgggggccatggtgcgcaagcatgcgctggccgtggtgtccaccaccagcaccgccatcctggtgactgcctatggcgccgtgctcaaggcgttcgcccacggtgtcgatccgctgttgttgggcgggctcatcctggccgtctcgctcacccgggcaccgatcatgattccgctcacctcgttcaccggggtggccatcaagctcttcctgcagcgccgcgacgcccccttcgccgcgatggtcaagccgttctgggcactgctcgcactcggtgtggtcggtggcgcggccgcctggttcgtcgggccgtggttcgtgggcttcttcaaccccggctaccagatcgccggctgggtgttcgcggcgttgaccttctcgtcggcattcatggccatcctcacgctgctgggcaccatggtgctggcgctggacgcccacgtggtctattcggtgggatggctggtggcctccgcgattgccctggtgatcctggcgacgccgatagccctcgccacccgagtggtgctgtcgctgtcgtgcggcccgctcgtgggtgcggccgtgatggtgacatggcttgccgggtacgcccggcggcagcgggtcggacgcgaaccccgttaggtgggcagttgtgcggcgtcattgccgcacagttgaccactcagggaactggacgtgtccacttcgtacgatgtggcgcggggcagcacgaaccagcgcgagctcctatcgtctggcaaagccgagcgccgtgtacaccaggcgccgggcctgggccatcaggcgggcacgcgcattgccgacgcaccgatccaccggacgcaccacctgcgggtactgggccgccaggtagtcgtggaaggccaccacctgcgccgcctgcgacgccgacagccgcaccgaccactgtccgccgctcacccggaatgaggccaggggggcggcgagtccgtagaagtcgccgtggccgcgtccctcgtcggccagcagggcccggcaatagctgcgctcgtcgatcacataggagttggtgccgtcccaccagccgatcgcctcgagggcctcgcgacggatcatgacgcagccgggctccccgaacaggttggacccggcccgcacggttgcccgcacggcgtcggcgccccgatgcagtccgacgatcgtgcggggcaccccgcgtgccgtaatgatcgtggcgccgtccccattgaccaggcgccggcgcgtggcgcacagagtaacggtggggtgccggtcgaacaccgccacctgggtggacaacatggccggcgagatcaggtcgtcgccgggcagcagcttgatcagctcgccgcgcgccgcgcggctcacccggttccaattgtgctgggccccgccgcccggcgtcgtggggctgagcacccgcagccgcttgtcatcggcaaagcggtcgatcaccgcggcagtgtcgtcgtcggacgaatggtcggcgatcaccacctcgtagtcgacgtagcgctggttgagcgccgacgccagtgtgtcgtgcaggtagtcggcgttgttgaaggcgggaatcacaaccgagacgcggggactcatggcgtcattgtcgcagagcaggcaccaggccaccgtcgaaatgtcggcgggccaggtcggtgtaggtgcggttgatgccgtcgagcagcgacgtcctggcacgggcgtccacctcgggccacacgccggagcgcatgctcaggtcgcgggtctgcacgctcgccagtggcgaagcgccctgcatgatcagcggcttgtggccgatcaccaggcgggtgagtcccagcagcgcgccgatggtggtgccgtagccatggcacagcaccttggtgtggcagcttcccggctcctcctgcgccacccgctcgagcgtggccagcgtcagtgcggcggcgtcgtcgacgaacaggtagtcacgaatggtgtccagcggcacatagacctgcacgggacgatgggtgaggaaccccatcagcagcaccgagatgaggccctgcgacttggacaggttctggccggggccgtagaggttcgacagccgtccacacaccacgcgggcgccggtctgcgcggcgaatcggcccagctcctgctccatcgccagcttggtgcgcccataggcgccgagtggacgggtggggctcgcctcgtcgtagggggccgacccggtgccggcatagacgccgccggccgacgacgcgaagaagaagcgcaggcgttccagctgggcgccggccaggctgcgcagcgtgcgcaggaacacccggaacacccccagctcggcgctgaacacctcgggagccgagctgggcacgcccgctccggcgcaccagatgatcaccggatcgggctcggtggcggcataggccgccaacccggcggccaggtcggcatcggcgctggcgtcgtcgtgccagcgcacgcggcggttgaacagctgcacgcccaacgcacgcagccgggccgtcacggcactgccgagcagcccaccagcgccgatcacccaggcggagcgcatctaggccccgtcgcggggcgagccgggcaggcactgccatcggggtccccggggtcgtccgggcccggattgggcggccgatccgggctgtgctgcgcccccggatggtgttcctcctccggattgtgctccgcagtgggcccggcgtcccccaggggtccatcggcagggtcggagacgatcaggtacagcggcttgcccatcgccacgttcacggtgacgccgatgtattcggcgatgatgcccagcgcgccgaggatcagcccggtgctgatcaggatcacgcacatcgtcgaggtccagccctgcaccacggtggggccggtgagtgccgagacggcgatgtagatcgcaaagatgataccgatcagcgtcaccacgaaaccggtgatggtgacggcacgcaggccgcgggtgccgctggtcacgatcatccggccgaaatggccgatcagggtcttcagcgaatagctggagggacgctcctcgtggcgcatcgccagcggacaggtggtcacgcgccgggcgatccaacccagcgccacgtcgaggtagacccccggtccggcataggcggccagggcgcgtcctgtctcgccgagcaccaggcggaagctgttgaactcgggggcggtcctcgaccccatcgccttggacaggaacagcttggcggtgcgcgacgcccaattgcggaagtggccatggggcggcggattggtgggcttggcgtagaccacggacgcccgctcgcgcagcgcggtgtcaagcatcgtgccgatgtcggccgggtcatgctggccgtcctcgtccatcgtgacgatccagtcgccggccgtggacgccatgccggccatcgtggccggatgctgcccgtagttgcgcgacagccacaccggccgcacgaagtcgtgggtgcgcgccagttcgtggatggtgcggtcggaggcgtccgggccgttgtcccacaccggatagaccaggtcgacgcggaagctgtggcccgccggggtgcgtgtcacggcggtgagcggctcgatctcggccagcaggtgcggcagggtgcgttcgcccttgtacaccgggatcaccaccgagacggtgtgcacccgcgcagtgtcggcggaatcgctcatcgcggtggctctcccttcgtacgtgacatcggatggtccggcccgggacggtcgggtgcccgtcgtggcatgcccgcgaggcgcccggcatccccatcatggcccgtctccaaggtcaccggctcggcgcgcgccgccgtgagcgcgatgacagccggagccccgtcgtcatgcccaccacggcggcggcgcacgagacgggttacggcaatgcccagggcaagggcccaggccagcgcgaaggcggcgatctccagcgtccagccgggcggccggaaggtgatcgtcacatcggtgccggctgcggtggcgggcacgtccaccgccagcaggtaatcgcggatggggctggccaggctggcgccggttgcggtgtagccgggccaggccagccggctgaatgcgatggtgccgccctgcgcgctgacggcgtcgatgtgcaggcgcacctgcgtgtcgccctgcgagaccactgaatagcgcagtcccgggcttgcccagctgggtgatccggccggtgcggaggtggtgtcacgctgccaggtgaacgagcggtcggtgatattggtcagtcgccacccggtgggtgtggggaagcgggcctgcagggtgtcaacggcattggccttgttggcgagcacttggatgctgtcgatgcccagcaggtcaaccagcagcgtgccattggcctgcggcaccccggagaacagccggtcgatcgcctcgtagcaggtcttcccgtagtagctctgcatgcacagatcgtcgccgaacgcctggaagccgctgggggaatacaggttcatcacgtcggaggcgctcaggtaggcgaggttgcccacggtggacgccgtccagaacccggtctgcaggttgtcgaaggggcccaccaccagcgtggtgccgcgggtgcccggtagtggcttctccagcgctgccacctgcgaggggaatccgctggcgccgaagcgcttccacaggcccggcgtgaagtgcgctgcctgcacggcggtgatcacgcagctcagggcgatgaccagcgcgcagacgcggcgcagccacgctgcctcgtcggccctcgtgctggccaggctgcgggcgcgtccccacgcccagatgccggcggtcaccccacacagcacggcgcacgacgcgagctgccacgcccacgacgacggttgctgggaggcggccagcaggtgcccggcgaaggtcaccagcagtgcggccgccaaccggcgtcgcgaccaggcgcgcggccgcagggccgccgagaagaagaccgcggccaccacgaccaccatcgtcaccagccacggcatggtgcggatggggaacctcagcggccccaggtcggagggacccagcgcgagtgccagcatcagggcgccgaggatgaacaacagctgcatgcggtgtgcggcgcggcggatggcgggccagttgcacagcacgagcagcggcaggaaccaggcgatgtaggtggccggcaccagcgcatagcgcatcgacccgggcacgccctgcatgtcggggttggcgaagggcgcggccgacacggccagcccgttgagggtcaacgccatattgccgttgttgagcacgccattgccctggcgcaccgtgacgcccgcggtgagcatcgccggcaggtacagggccagggtcagcaggcccatcggcagccctgccagcacggtgcgcagtgcccgggacgccgtccgccggatggcacaccagatgaggaaggcaacgaaggcgaacaccaccatcaccgtgccctgcacataggccacggtgatggtcaggtagccggccgcgaaggcgggccaatatgacttcttctgcacgatgaagcgccacaggccccacaacacccacgggaaataggcccagacctccaggttcgtcacccacgacgtggcatccaggaacagcgtgaaaccgccaagcggtgccgccacccctgccatcacggacaagcagcgccgagcaccgaattgccgggccagggcatagacgcccgcgccgccgaccatcatgaagaacagcttgacgccggtggccatcacggccgcattcgacaccagctgggtgatcaggccgatcacgatcaccaccgggttgagcagcccgaactgttccacggtgtagttgcccgccatccacgcgctcgggttgagcagtggccaatgcccgtgcgagatctgacggccgagctcgaaccattgcccgtaggcgccaccggccgagtcgtcgtaccagtagaagtggctgttggtcagcagcggggtgagtccgatgagtgccaccagcgcggccaccagtccgatcgccacgagctcgcgacgcagggagcccgtcgtcgagcggggccggggtgagtggtgggcgtcgtcggccagctcgacctcatggcccggctggctcatcggcaggcctcgatccggtagagcaccgcgtggccgttgttggccaccggcacgaagccgggcgcctcatagaggcgggcgaatcccggggcgtactgggcatagttcgacctgttcacctcataccacccgaagtcgagcgcataatgcacattgaggtcgctcaatgcgtgacagacttccgggttgaattccgcgaagcggagattctgattgatggtgtagacatcgcgactcggcgtgtagagaatatgggtggtggtggtcttcacattctccagtgcatatgccatggagctcccgttgtacggcacggtggccaccgtctcgtcggccggcaccagctcgggcaggcgcttgagcagcgcatattcgtcggtgtccaccacgttgccgttccaggtgatgcggtagctgtccgcggcgtcgcgcagggtggtgcgcagcgtcggcgccagcagggtggcgggcacgagcaccacggccagcagcagcgtcaccgtcgccacgatcggggtggtcggggcggtgagctggcggcgggcggtgagccagccgacgagccaccgcgccatcgctgagcagccgatgacggccagcggtagcgcggtgaggggcagggctgcggccaggcgactgggatcgttgtaccagatgcccaccagggcgttgcggagccacccgctggggaagcatgacaccgccatccacaggaagatcagcaacccatgggctgcgagcagccagatctgccggcgggtgacgatcaccaccacggcgccgaccaccaccagcaccgagatggccagcacggtgatcgttgcggtgctgggcgtcatggtcagggcctgccatagtgcgcggcggggtccgatgatggcgttccagacggccgcatcctcgggtgggcggatctttgcccagatggcgatgatcaccagcgccgcgagtgccgtcaggccgatggccccgcgacgttgccaacgcggctggtcggcgtcacgcgtacgcaggatgcgggtgagccaggtggccagcatcgggatgagcaccacgcagaacagcgcgatcgtattggggtgggcgatcgccatgccgaacatcgccagcagtccgacgggaagcgcggagcgcagcggcgtgcaatgcccgccgagcccgagggcctggtaggccagggcgatggttgccgggatcagggcgatgccgaacatgttcgggtagagcacgccccacgacgcgggcaagtaggggaacgccgggaaggcacccaccatcaggccggcggcaacgagtgccggcgcattgacgcatcccagcacgtgcagcaggtagaagcagccgagcacccagaccacggcgggcacggccaccaccatggcgttgttggcggccaccacgtcggtggagtgcaccatcttgagcgcgagggtggccacgtcgtgccaggccagcggatagaacgccgcgggattgtcgcccgtggtcatcgtgatggccagcgacgagccattcgagttgtccaggatccagcggatcgcgctgaggtggaacacattgtcgaacgactgcgagaagttgtcggggcggcccaggatcgtgatgatgtgccaggcggtgagcaccatgcccagtgcgccggcgccgagccaccagccggtggccggtgggcggggggcaccccgcgtggcggacccggtcacctcgggggagccgggcgacgccgcagaaccagacgacgcggatgcggatgcgggcacggacgccgcgacgcgccgcgggcccggtgtgccgtcggcgtgcggggcatggcccgtgcgtgcgtccacgaggcgatgtgccagccaacgcaccaccaggcagccgagcgcacagaccaccgtcagcagtgccggcggcagcaggttccagcccaggcccaccttgttggcgacgatggccgacgcggcgatgatggcggtggacactcccggcgcgagcgccagggagaccttccacggcagtttcgcgcaacggttcacgatgccgccgggcagcatcagcagcaccactgaggctgcgacgagtgcacagaagccgagccagctcatggatgcctcctggatgccggacgctggtgcgttgtgatggccacctgcggcccgttcaatggccgattgccacgagctgggccaggtaatcgccgtagcccgacttcgcgagcagccgggcgcgcgccagcaggtcgtcgtcggacagccaaccctggcgccaggcgatctcctcggggcatcccacctgcagtccctggcgggcctggatggtgcgcacgaagtcggacgcgtcgttcagcgagtcgaaggtgccggtgtcgagccaggcggtgccacgcggcaacacctcgacgtgcaggcggttggccgccatgtagatgcggttgatgtcggtgatctcgagctcgccgcgggggctgggggccaggttgcgggcgaagccgaccacgtcattgtcatagaagtagaggcccggcacggccaggtgcgagcgtggctcggagggcttctcctcgatcgagacggccatgcccagggcgttcacctccaccacgccgtaggcctgcgggtcggccacccagtagccgaagatcgctgcgccctcgacgtcggtgtttcgggccaggcgcgtgcccagcccggggccgtagaagatgttgtcgcccagcaccagggccaccttgtcgccaccgatgaagtcggcgccgatggtgaatgcctgcgccaggcccttgggtgcgtcctgcaccgcgtaggtgaggttgatgccgaagcccgagccgtcaccgagcagtcggtggaaggaatcggcgtcctcgggggtggtgatcaccagcacgtcgcggatgccagcgaacatcagcgtcgacagcgggtagtacaccatcggcttgtcatacaccggcaccaattgcttgctggtgcccatggtgatcgggtgcaatcggcttcccgtgccgcccgccagaatgatgcccttcatgactgctcccagattcggctgctgctagtggcgacgccccggccgcgcccgcgcgcacgttcctgtgcgccgcaggctgatcaggcgtcggggtcaatctatcgggccggcgggccagtctcgatagactggggcgacgatgtcgcgcgaccggagggtggggatgaccagaacgctgatcatcatgcctgcctggaacgaggacgaggtcatcggcgacacgatcagggagctgcgctcggtgctgcccgacatcgacctgctcgtggtcaacgacggctccaccgatgccaccgtgagcgtggccgaggcggcgggcgcgctggtgctcaacctgccctacaacatgggtgtgggcggggcgatgcgagccggctacaagtacgcgcgccgcttcgattatgaccaggccatccaggtggacgccgacggccagcatgatccgcgcgatgtgcgcacggtgttggagggcctcaagcaggccaacatcagcatcggggcgcgtttcgccggccgtggcgaatacacggtgcgcggtccgcgggcctgggcgatgcgcttcctggccggcatcgtgtcgcggctggcgcactacaagctcaccgacatcaccagtggcttccgtgccgccgatcggctcgcgatcgagcagtactgccgtcacttcccggtggaatacctgggcgacaccatcgactcgctggtggtggcgatccgctcggggctcaccgtgtgccaggtgccggtggagatgcgtccgcgccaggccggcacgccatcgcacaatccgctcaaggcggccctgtacctgagccgggcggtggtgtcgctgttcatcgcgatgacgcgtcgcccggtgaagcacgacccgtcgctgcgtgccgcacacggcgaggaggccgcactgtgaaaagcaccatcttcttcgtgatcctcaccgtgatcatgctgttcgtcgtgggcaacctgttgcgcagccgccgcatccgcgagcgctatgcggtgctgtgggtgctcgtggggctgttcatgctggtgctggtggccttccccgtgctgctcgaccggttggcccacctggtgggcatcgccgtgccgtcgaacctgctgttcatcctggcgatcgccatgctgctgggcatcaccctgcagttgaccctcgaggtgtcgcgcgccgaggaccgcagccgcgtgctcgccgagaacgtcgccatcctcaacctcgagatgcgcgaggccgggctcacccacctgccgacgcatggcgcgcccggcgacgagatgagcgacaccaccgacgatgggcccgagggtcccgacgcgtcccggtagccatgcggcccggtagccacgcgtcgcatccggcaagtgggccggctcgtccccgtccccccggcgccggtcgataggctggccacctgcccgccgaccgtatgcggcagggtcttcccggagaggttgcgacgagcgatgactgttgatgtgctgttccccttctacggcgacgtggagctgatgaagcaggcggtgcacagcgtgctgcgccagagccatcgcgacttccggctgatcgtcatcgacgacggttaccccgacgcgtcgatccccggctggttcgccgcgctgggcgacgaccgcgtgtcgtatgagcgcaacgccaccaacctcggagcgaacggcaactaccgcaaggcactcacccgggtgaccaacgagctggtggtggtgatgggcgccgacgacgtgatgctgcccaactacctgcagtggctcgtcgaccgtgccggggagcaccccgaggtgcagatcttccagcccggcgtcgtggtgatcgacgagcacggcagtggcgtcaatggccttgtcgacgccgtgaagtccgtctaccggccccgcggcagtggcgtgcgcgtgctcaccggtgaggcgttggcggtgtcactgctgcgcggcgactggctgtacttcccgtcggtgggctggcgcgccgagaccatcacctccatcgggttccgcgagggctacgacgtggtgcaggacctcgccctggcgctcgacgtggcgatgcacggcggttcactgctcgtcgactcgcagctggccttcatgtaccggcgccactcgtcgtcggattcgtcggtgcgcgcgctgtcgggcacccgcttcgatgaggagcgccgcttcttcgagaacatggccgccgagatggccgagcggggttggaaccacgccgcccgggtggccaggctgcacctgtcatcgcgcttccacgccgccacgctgctgcccggcgcgctgcgccacggcaaccgtgagggcctgcgcaacctcggccgtcacctggtgaagtagaccgatacccatgcccacggattcgtccgacgccaccccacgggggatggtcagcgtatgcatggccacctacaacggggccgccttcgtcaccgagcagatcgcctcgatcctgccgcaactcgcagccggcgatgagctggtcatcgtcgatgacgcctcccgtgacgacacggtcgaggtgatctcgcgccttgacgatccacgcatccggctggtggcacgcgacgagaaccggggctatgtgcgcaccttcgaacaggctctcagcctggcgcgcggcgaatacctgttcctgtgcgaccaggacgacgtatggatccccgggcgcgtcgacatcatggtggaggcgcttggcgagcaccaggtgattgcgtccaacctggcgaccctggggggccctgaccgcattccgggcccgttctggatcaccgactggcgcgtcagctcacgcgactccgaccactcggtgcgcaacctggtgcagttgctcgccgggctgcagtgctactggggatgtgccatggccgtgcgtcgtgacgccctggactacctgctccccttcccgcgcttcctggacgagacccatgaccagtggatcggactgtgcgggaacatggcgcattcgatgggccatgttgatgcgcgcacggtgtggcggcgcatccatgactcgaatctcacgcccacgcagccgcgggggctcatccctgccctgcgttcgaggttgatgctcctgcgctgcctggcggttgcctggcaaaggggcctgcatgtcggcaatccacgaaagcacgggtgaaacgaggaatggctgtgaaccatgcgggtctgtcgccggtggcggtggtggtgtcgctgttcaaccccccaccgcaggtcgtcgagcggtgcgcgggttgggtgcagtcgatcgggccggtgttcgccgtggacgacggctcgccagacccggccgtgcaccgcgtgctcgatgcgctggtggcgcacggcgtcacggtgctggtgaaccaccgcaacgaggggatcgcccgggccctcaacgtgggcatatcccgcgccctgcgcgatgtcgcacccgcgtggatcctgaccatggaccaggattccgaactcggtgacggctatctcgcggcggcgcaggccacgttggccacggcccggcgaaaagaccgggtgggcatgctgtgtgcggagtggatcggtgacctgcgcgctcccacgatccgcagccgcggcgtcgtcgaggtacgtgagccgatccagtcgggcatgctcatgcgggtctccatgctccgccagcttggcctgttcgatgagtcattgttcatcgacgcggtggacaccgacttcgtggcgcgggcgcggcagcggcgatggagcgcggtgccgatcgtgggtgggcacctgcaccatgcgctgggacagaccgttccggtgacggtgcggggtcggccgttgacatggcgtggacggcagcgccacatcacctaccaccccccattgcgcagctactacacggcgcgcaaccagctgcaccttgccggacgctatgcgttcaggtgcccgggggtcccgctgcggacctatgccacgcaggccaccatcctggcctcgctcgcggccttcgcccgggaccgtcggctgcagtgcacggcgctcggcctgggggtccgcgacgcgctcctggccaggtatggcccgatcggcatcggggcgtcccgggcactcggcctgccggaacccggcgccaaccccgcccccggtgcggtgccacggaacttcgaacgccaaccggtggtggcccagatactgctcagcacctggaacgggcaggaatacgtggccgagttgctggagagcctgctgcgccaggagacgcaggcgcaggtgcgcatcctggtgcgggacgacgggtccaccgacgacaccctcacggtgcttgacggattcgccgaatgggacccccggatcaccgtggtcaggggcgagaaccgcggtgtcgaccgatcgttccatgcgctcatgcagatggctgatcccgacgcggacctgtacttcttctgcgaccaggacgatgtctggttcaccgacaaggtgcaggcggcagtggaggccctcagcgaccaactgggcctgtccgacgcgtccggtggtccgcgcccggcgctgtactgctcgcgctccatggtcaccgattcgtcgttggagcccatcggcccgacgcgggactacgagcgcgcctcgctggcgcatgccctggtgatgaacatcgcgcccggccacacgatggcgctgaccgcaccgctgctgcggctggtgcgcgatcatttcgatcccgacaagatcatggtcttcgaccactggatctacctggtggcggcgggcctgggcagtgtggtcttcgaccacacctggcacacctggtaccgcaatcacgattcgaatgccatcggatattcggtgaaggactcatggtccacccgcatcgccgcggtgcgtgaggcggacttcggcgcctacacccgtcaggcggcacagttcgagcgggatttcggaagccagctccatgggcgtcgggcggcccggctgcgcgggttcgtccaccagggatcgctgctgtcgcggctgcgctatgtgcgtcgcttcgggatcgagcacggctcaacgctcgcctcggtgagcgcggccgtgctgttcatcgtgggcagctaccggccctgatccccgtggtgggtggcagccccggtgcccacgtcgtagcgggcacgcagcacccgcagggcgggcagcacggtggccgccatgatcaccgcctcgctcagcgcgaggccggcggcgatcccggccgcgctgtggtgcaatccggcgaacaccatcgcgatgattccgaagagcgcggcaaccgacgttgccagcaggaccgtcctctgtcgtccgttgggcaccaacaggttgcgcaggaacggcgttgaggccgaaatgaacaggaacgccagcgcgtaccaggacgtgagtgcgaagccggcggcgacctgcgggccgaacagcacctgggtggcccacggtccgagcagcgcgatgcccactgcgcccaggaggcccaggagcaggtgcagggcgatggccgcgtggtggcgcctgcgcccggacgcaccctccacctcgagggtccagccctgcagggcattccccagggcggtcacggcgaacagcgcatagcggtagagctggtcggcagaggcgaagcggctcgaatcgatgctgagcaacagcgccgtggcgatgggcaccggggcataggcgtaggcaaccccgacgaggctggccgacgcgatcgacgtcatcgatcggatcgagcgccatgcgtccccgaggctcacgggtgaggagggggcggtggtgatcacgcgtcgtgggaacagccacagggcgaccaggattgcgatgatcaggagcacggggtaggcgatcatcgaccgcgtccacaacatgatcggcaccgagacgatggtgccgatcacccgcggcagggtgtcgtagaggccgagtagcttgggccggcccaccccgatgcagaaccactggggcgacagggcccccattgtgaatgcgcacgccacgagtgccgcggggagtcggacggaggccggcgcgagcagcagcgtgaccaccacggtggccggcagcacgaaggccagcatgagcaggcggctgtagacgctctcggtgtacaggcgggagcgttcggcctcggaggcctgggccaccatggcgggccccacatagctccaaccccaggtggccaggctcatgccgaatgtgccgatggacatggccgcgacaacgcccgaccagccgtcgcccacgaagcgcgcgatgatcggcgtcgccaccaacggagtgaccagcgacagcagcggccagccggtgaagccggcgagccgacgcaccacctcggtggcggcgcccgcgttgtcacgattcactcagtcactctttcggctcgggacgcgccgcaggtgtgcccgtgtggtggtcatcgggcgccaacatggcactcgggacgcgaatcgtcgtcacgtgtgcagcgcgtgcgttgacaatatcagcgcgccaggatgcggcacgcgggcgccttcgtggccggtgggacagcccacgaggctgcggctgcgtccccggcagggtgccctgcctctcccacagggtgccctacttctcccagagggtgccctatttctcccacagggtgatggtgtgcccctgcggcacgccgctcttcgcgtagacgctgtggtagccgagctcggcgagttggggaccgtacacggcgcgccgggtgtgccaggaggcaacccagatgcgcgggggaagccattcctgggcggccaggttgagctccggcgggtcgtgcgcccaggcgaagtccaggggtggcttggtcggctgggccaggtcgatgagcgtcgagaaggcgcccggatccaccgagaccgcgccgcgataggagaagacccagttctggatcgggtcgatcaggaagccatccccggcccgggcggattgccgcatgaccctggacatcaggttgtaatcggtccccgaagccttcgcataggtacgctgctggaacccgaacagggtgagggagcccaccatcaggaggatgaccaggccccgtatccagcgtcgctgcgcatggatcgccaattctgcaagggccatggcgaagaaaggtgccaccggcgtcagatagcggccctgcagcacattggtccacactagggaggcgatccacaggatgcccaccccggtggcgaccgggaccagggcaaacgccagccggcgtaggtgccggccgcgggactcgacgacgactgcgatcaggaggatggcggcaaccaccgccatagctgcggcaattgcatcgggcaccctgtccgatatctccggcaccggaggggttcgtgacgcggcccaggactgcaccagggctgtctcgatgagggaatacttctcgctggccaaccatccgatctggcccagttggcgtgaggtcgccacgccgaacggcgcgaccaacgcggcgctgacgatcccggcggcggcgagcatccatcgtcgcctgcccttggtgaagaaccaggcggcagcaaccaggccagccatgggaagcgccgcatacaggtgcaccagcatcgcggccgcaatggccagcacaaggcccacccaacgcagccacgaggggcgccggcgatagaccaccacgagcaacagtgcgagcgccgcgaacatcgacgacatcgcatagggccgtgcttcgatggccatgagcagtgtgcgggggagcagtccgtaggcggccgcataggcgagttgcccccgtcggccgaccagtcttcgtcccacgcccgccatcgccatcgtgccgacaccggcagcgatcacgctgggcagccgcagcgtgaagggcgtgatgccgaccaggtcgacccaccagtgcaccacctcgtaataggcggcatggaccatgtcggacccggacggcagcgtcggaatgccctgccacatgctggccatgtcccggcttgaataactcacgacgtgtgccgtggcgacctcgtccagccacggcgatacgcgccaggcgccaaccagagtgagaagaaccacgaccagccccaggaccgcgtcgccccgcacactctgcggcacgagacgctgcaccactccgattctcgtgggcgatgcttcgttccggggcatgacgacaagactagttgtcgcagcggtatatcagtgggcggcgcgcaagcgcatcactcgctcatgcctggcctcgaaatgattctggtaccagattgttggggatattgattcggatctaccgcgactggcaaacagccgttcatattcccaatcaatcagggcggttcactgtcggctgttgtccggacccgtcccggcgcaactgcgccacataggcgtccaggcgctcctccatggagggcggacggaagccggtggcctcgatgcgggtgaggtccagcgtgctgtcggcggggcgcggtgcggcgtccttgccggcgaagtactccgccgtgctgatcggtgacacatcctgcgggtcgtggccgctcagggcgaagacgcgcttggccaccgcggcccagctcagcggggtgccctcgttggacaggttgtaggtgccccatgcggcgtcgtggcgcagcaggtggatgatgccggcggccaggtcggtggtgaaggtgaggcgtcccacctggtcgtccaccaccttgggggcgatgccgcgcccggccaggtcaaccatcgtgcgcacgaagttcttgccgtcgcccaccacccagctggtgcgcacaaggtaatgcctgggcgttgcggccacggcggcgtcgccgccggccttcgactgcccgtagacgcccagggggctcggcatctcgtcctcgcgatgcggtgcccgggtgccgtcaaaggtgtattccgacgagatgtgcaccagcgtgagcccgtgctcggtggcaacccgggcgaggtttgccggcccggtggcgttcgcggcccatgcccgcggcctgccctgggcggtctcggcaccatcgacgtcggtccaggccgccgcattcacgatgacgtcgacggtgctccagtcgtaggcgtccacactggcccggtcggcgatgttgagctcgtcgaggtcgacgcccaccgggaggaagccggcatcgggcagctgcgccatgagcgcgcgtcccagctggccgtgggcaccggtcaccagcaccctcggcatcgccggggggaagggcgtcactgcgtcgaggcgcggatgggcgcggtccttgtccgacaggatcgcgtcgtccagcgcaatgggccagtcgatggccacggtctcatcggccaggttgaggaaggtgtacttcacctcgggcgaccagtgcgcattcaccaggtaggtgtaggcggtgttcggctccagcgtctggtaggcgttgcccacgccgcgcggcacgtagacggccactccgggatcgatctcgcaggtgaacacggtgccgaagctgggaccctcgcgcaggtccacccaggcgccgaagacgcggcctgtggccaccgagatgaacttgtcccagggctcggcatggatgccgcgggtgacgcccacctcatcgttgaacgagatgttgttctgcaccgggccgaagtcgggcagacccagcgcggtcatcttggcgcgctgccagttctccttgaaccagccccggttgtcgccgtgcacggtcaggtcgaacaccaggaagcccggaatcggggtggtggtggcggccagctccttctcgtggtcaagcgccatggtgtcagtgcccctgcgccgcatacttggcttcgacggcggccttctgggggcgccaccacgattcgttggtgcggtaccagtcgatggtgtgcgccaggccggcatcgaagtcgcggtagtgcggctgccatcccagctcggtgcgcaacctggtggaatcgatcgcatagcgccggtcgtgtccgggacgatcggtgacatggtcataggcgtcggcgggctggcccatggtcaccaggatcttctcgatcaccgtcttgttgttgagttcgccgtcggccccgatcaggtaggtctcgccgtagcgtcccttgtcgaggatcgtgagcaccgcggcattgtggtcgtccacgtggatccagtcgcgcacattgagcccgtcgccgtacagtcgggggcgcacgccgtcgatgatgttggtgatctggcggggaatcagcttttcgacgtgctgacgcggcccgtagttgttggaacagttgctgatggtggcgcgcacgccgaagctgcgcacccaggcacgcaccagcaggtcggaacccgccttggtcgacgaataggggctcgacgggttgtaggcggtgtcgggctcgaactttgccgggtcgtcgagcgccaggtcgccgtagacctcgtcggtggagatgtggtggtagcgcacatcatgggcgcgcaccgcctcgagcaggctgaaagtgcccaccaggttggtctgcacgaagggtgccgggtcgagcagcgagttgtcattgtgcgattcggcggcgaagtgcaccaccgcatcggcgttcgacacgagcttgtccaccaactcgcggtcgcagacgtcgcccttgacgaagctgtagcgatcggccggcaggcccgccagggagcccatgttgccggcgtaggtgagcttgtcgagcacgaccaccgtgtcgtcggtgtggcgcagcacgtggtgaacgaagttggagccgatgaaaccggcgcccccggtgacaagtagtcgagccatgccagcacactagcaaccccggacgtgacgatcgggcggccgttgccgaccgcccgatcacccatgggctgcttggagccacccctgctcagacgtcgtactggtacaggttgtaccggtccatgatcgagatgatcttgttggcgtaggtcgggtcggtggcatacccggcgttggcgatggcccgcacgaagtcctggtcattgttggtcaggaaggccgggtagtagcgattggccgagttggtgggatcgcccaggctcaggaagtagccgtggtcgaggaaggaatctcccacactgttgtagctgcggaagcctgcctggatcgtcacgtacccgccgttctcatattcggacgtcgagtaggaggtgcaacccgagacataggggctgccataggcggggcacttgatgccgaagtagttgtggtcaaccagcgtcagtccactctggccccaaccgctctcgatgatcgactgggcgatcgacactgccgccggcacgccgtacttgcgctgctcctcttgggcgaatccggccacccacttgatgtagcccgcctcgtcaccggcagcaggggccgagccgccaccgccggaagaagaaccattcacctgcaccacggtgccacccgactgggtccacgagatggtgccgttctggtaggtctgcaccacgccgtcgcccgaggggttctcgttgctggtggggaagcccagcgcaccgtcggagccgccccggctcaggtaggtggccaggatcgcgccgtgcaccgtgtaggcatagttgttctcgcgccagtagacgcgtccgccctggaagctctgcgagacgccactgttgatgccgttctcgttgctgttggggaacgagaggatgccggccgagccgttctggttgacgtactcgttgagcaccgcgccgtgcacggtgtgcgcaccggtgtcggacttccagtagatgcgtccattggcgaactgctggtaggtgccgccattgagggtgccctcgtcgatgacgggcaggccgaggatgccggccgatccgttctgggcgatgtactcgttgagcactgcgccacgcacggcgtgaccaccaccggtggcactccagtagatgcgtccgccctggaactgctggaaccagccgccgctgacggcggtggagtcgccgatcggcaggcccaggatgctggcggcgccaccgagcgcgttgtaggtgtcgccgatgccgcccgcgacggtgcgcgtgccattgcccggggtgcagtagatccagccgtgctgaaactgctgcacccagtagtcgcccacctgggtggagtcgccgatggggaggccaagcttgccgtccgcaccgccggacgccacataggcctcgccgatggcgcccatcgtagcgtgggtgccgttgccgggcgtgaagtagatgcgcccgtcgtggaactgctggtagtaggcgtcgccatcagcggtgggcaccagcgtcgaatcgccggtgggaagccccagcttgccggccgagccgttcatcaccacatagagctcgccgatggcgcccatcgtagcgtgggtgccgttgccgggcgtgaagtagatgcgcccgttctggaactgctggtagtaggcgtcgccatcagcggtggggatcaccgtggagtccccggtggggaagccgagcttgccggcggagccgttcatcgatacatagaggtcaccgatggcgcccatcgtggcgtgcgcgccatcagcctcggtccagtagatgcgtcccttgtcgaaagcctggtaggcgccaccggccaggtcggtctcatcggtggtcgccacgccaagcttgccggacgccccaccgagtgcctcataggtggcgtcgatggcatcacttgccggtgaaccgagcaccacctgcgggccatcagcattcgaccaggtgatgcgtccattctggaagcgctgcgtgtaggtgtcgccactcagggttgagtcgccggtggggaagccgagctctccggctgaatcgttcgccatgatgtaggcgtcgccgatgccgcccgccaccgcgtgggttcccccggcctgactcgaatagatgcgtccgttggcgaactgctggtagctgccgccgttgagggcgatctcattgccgagcgggaaaccgagcttgcctacaggcccgctcagtgccgaatacgtggcgtcgatggcgccggtggtgacggaggcgccatccgtgttgctccagtagatgcgtccgttggcgaactgctgatagtagccgccgctcacctgggtggaatcgcccgtcggatagcccagcgcgcccaccgagccgctcagcgagatgtaggtgtcgccgatgccgccggccaccacgtgcgcgccgccggcctcgctccagtagatgcgtccgttggcgaactgctggtagctgccgccgcccagggtcgcctcgggcgataccacggcgccgagcttgctgctggcgccgcccaactggttgtacaggtttgcgatggcactacccgaagtggtgttggccactgccccggaagcgtcggacgccgaatctgctgacgttgcagacggctttgtgctcgcggtgctgcccccactcgccgacgcgtcggttggcgtggcggaggcgctcgtgtcagaggttgttgaagtcctggtgccgggggtggccgtgctgctcgttgccgaactgtccgtcgaactggccgtggccgcgctggcgccgggggtggcggtggcgctcgtggaggtgggggcagtgctggtcgatgcgtcagaagtggtgtcggcagacgcattggacgggcagagggccagagacaaccccactgccggaatggcggcgagaatgaagccggcggtccgggtgtaggggatgttcttcttagagggctctgctagcacgagctcgtcctcctattgttgaggggcacagaaatacagcgtcacgcatattgcgctattcgtcgcgcgtatgccactttgggcctcaacccacggttgagctttagacctacgggcacagctgccctggtggcgccatgggtccggggtcgatgccacggcgcaggcggccccaccgggcggcacgccaccggtttgccgtctcaccggtgcctgcccgggtcggttatcgtgaaggggcggcaccgtacggggcccgcctcgacgctggacagtgagggagaaacttcggtgcaagcagacttggtgatcgtgggcgcaggcctgtttggcctgaccatcgcggagcgtgcggcgaatgagctcggcctcaaggtggtggtgctcgatcggcgcgaccacatcggcggcaatgcctactcggagaaggacgcggccaccggcatcgaggtgcaccgctatggcgcccacctgttccacacctccaacgagaaggtgtggcagtacgtcaaccagttcactgacttcaccggttatgtgcaccacgtgtacacgaaccatggcggcgaggtcttcccgatgcccatcaacttgggcaccatcaaccagttcctgcgctcggcactgtcgccggccgaggcccgcgcatgggtgcgtgagcaggccggcgagctcgccggcaccaaccccacgaacctcaacgacaagggcatccagctgatcggacgtccgctctacgaggcgttcatcaagtactacacgggcaagcagtggcagaccgatcccaaggacctgcccgcgtcgatcatcagtcgcctgccggtgcgctacacctacgacaatcgctacttcaacgacacccacgagggcctgccggtgcacggctacaccgcgtggttcgagcggatgctcgccaaccccaacatcgaggtgcgcctgggcaccgacttcttcgacgagtccggcgaatactcgaagtcgaaggtcgtcggatccgtcccggtggtctacaccggtccggtcgaccgctacttcgactacgccgacggcaacctgggctggcgcacgatcgacctcaaggaggaggtcctcgacatcgaggacttccagggctgctcggtgatgaactatcccgacgccgatgtcgacttcacccgcatcatcgagttccgccacttccaccccgaacgcgactacaccaaggacgccaccatcatcatgcgcgagtactcgcgcttcgccgggcgcgacgacgagccctactacccggtcaacacggccgacgaccgggccacgctgctcaagtaccgcgagcgggtcaagcacgaatcgcagatcctgttcggcggacgcctgggcagttacaagtacctcgacatgcacatggccatcggctcggcgctgagcatgtatgagaacaaggtgcggccgcacttcgccaatggcgaggcgctggtcagcggaggagtggacgagtgagcgtcagcacggcaaagcagcccatggtctccgacttcagcgacaccccggtgtcgtcggtcgagagcaatggctaccgggttgccacccgggtgatcttccccagcgacgccgacctcgacgtgatgccgctgtacatcgacctcgatgaggacgagtcggagtcgcacatccaccccgaggacgtgcgtggacgcgattcgatcgccgtgcgccccggcgtgcgcatgagcctcggctcctatttcaatgccttccccgccagctactggcgtcggtggagcgtcgtgcgcacggtgcgcctggtggtcaacacctccggacagggcaccgtcgtggtctacaagtcgaacgcgcgcggcaaccgccagcgcgtgcagtcggtgcaggtgtcgggcgagcacaaccagcaggtcttcgaccttccgctggagaccttcggcgacggcggcttctactggtttgacctggtggccggcgacaacgagatggtgctcgagtcggcgcagtggtgggtgcccaccgccagccagccgcacggcaccgccaccttcgccaccaccaccctcaacaagcccgactatgtggtgaagaacctgcgcgcgatggccggcgacgtcagcctgcgcgacgtggtcgacgagatcctgatcatcgaccagggcacgaagaaggtggccgaatacgccggcttcgatgaggtgaaggccgagctgggcgaccagctggtggtgatcgaccaggccaacctcggcggctcaggcggtttctcgcgcggcatgtacgagggcgccacccgcggcaagtccgactatgtgatcctgctcgacgacgacatcagcctggagaccgagagcatcatccggctggtcatcttcgccgacatgtgcaagaagcccaccctggtgggcggccacatgttcgacctgttcaaccgcacggtgctgcacacctacggcgaagtggtcgagccctattactggcagccggcactgccccatcccgaccagtcgctgggccatgacttcgtgcacggcggcggcaagcccgacgatggcggcctgcgctccaccgaatggctgcaccagcgcaccgacgtcgactacaacggctggtggatggacctcatcccggtgagcgtcatcaaggagatcggcctgtcgttgcccgtcttcatcaagtgggacgacgccgagtacggcctgcgcgccaaggaggccggctacaacacggtttccctgcccggtgccgccgtctggcacatcagctgggtggacaaggacgacctggtgggctggcaggcctacttccacgatcgcaaccgctatatctcggcgctgctgcacagcccgttcccgcgcggcggcgacatcgtcagcaattcgcagaagctcgacctgaagcacctggtgtcgatgcagtactacacggtgatgggacgcctgcaggcccagcgtgacctgttggcggggcccggcacgctgcccggcctgctggccaccaagctgcccgccatccgcgccgccgcgaaggacttctccgattcgacgctgaagaaggaatacgaggacttccccgacatccatgcgccgaagccgaagcgtccccgcaagcggtcggtggagagctcccggttcctgaagatggccgagggtgccaaggcggtgctgcgccagttccggcgtccgcgcccgggccacctcgacaacccgcagaccgagatcgccttcaaggacaacaaatggtggaacaccgcgcagtgggattccgcgctggtgaccaacgccgagggcaccggcatcgcttggtacaagcgcgagccggccgagatgcgtcggatgcttgccgagtcggcggccaaccaggcccggatcctgcacgagtggccgcgcctgcgcgacgagtacaaggaggcgctgccgcagctgacgtccttcgagcaatgggaggaactgttcggcattgagcatcgtccccttggcgagccgcctgcgggcgaggaaaattgagcctgtgagttcgtctgatctggcgtcgctgccgttgcatgcccccgggcactccaacggcctgctcgacgtgccgaagtggcacttcctcctcaacctgttggtgaagaaggaactgcgcgtccgctaccgcggctcggtgcttggcatgctgtggagctacgtcaagccggccgtgcagctgctcgtctactacatggcgatgggtaagttcctgcgcctgtcggcgtcgatgaccaactacgtcatctacctgttcgccggcatggtgatgatcaacttcttcaatgaggtgatgggcaacaccacccgctcgatcgtcaacaatgcgccactggtgggcaagatctacctgccccgcgaattgttcccggtgtcgagcctgtgggtggcgttcgtgcacttcgtgccccagctggccgtgttgctgctgggggcgttgatcgtcggctggcggcccacgatgctcaatgtgatggccggactgctgtcgatcgccatggtcgccatcttcgcgctgggcctgggcctggcctttgccgcgtggaatgtgatgttccgcgacgccgagaacctagttgacctgatcgccatggtggccctgtgggtgtcgccggtgttctacaactggagcatggtgcagtcggtggtgcccggctggctgtggaacatctaccagtgcaatccgctggcgatgtcggtggagctgtcgcactatgcgttctgggtgcccacccggggcgtcaccgccacccggtcgatggccgagctgatgccaccgcactgggtgatgtggtcgggtgtggcgctgctcatctcgctgatcatcctggtgctgggccagatggtcttccgtgccaacgagggcaagtttgcccaggagctgtgatgagcgagcctgttgaatccacggtgatggtcgatcccaacctggtggtcgcgcggctgcgcgatgtggacaagcgcttcaccctgcaccacacgcactccatcaaggagtacttggtgtggacgatgaagggccgcaagggcgagctctcggagagcttcctggccctcgacgacgtcaacctcgacatccaccagggcgagtcggtggcgctgctgggcttcaacggctcgggaaagtccacctcactgaagctgctgtcgggcgtcatgatgcccgacaagggcgaggtggccattcgtggccgcatcgccggcctgatcgaggtgggcgccggcttccatcccgacctcaccgggcgtgagaacgtctacctcaacggcgcgatcctcggcatgagcgagtcggagatcgacgagaagttccagcgcatcgtcgacttcagcgagatcgagaagttcatcgacaccgaggtgaagttctactcctcgggcatgttcctgcgcctggccttcgcggttgccgcacactccgagcccgacatcttcctcatcgacgagatcctcacggtgggcgacgagccgttccagcgcaagtgcatcgccaagatcaaggaactcaaggccggcgggcagacacttgtggtggtcagccacgacctcgacatggtgcgcggcatctgcgatcgcggcgtggtgctggcgcagggccgggtgaccttcgacggcgacgtcgacgacgcggtggagttcctgcgcagcaccgagtgaattccctcgggccgggttcgggcccgggcccgggttcaggtctcggctcaggcttcggccccgccacgaccaagggccggccgcggcccccgcgttggcggtggcgttggccggtgccgtgctgtcagaggcggccggtgatgcgtcccgccgcgcggctcaggtagccgcgggccacctggtactggcgcttggcgaagttgaacccgcccccggcgcgcaccgcatggtcggtggcgcgtagctgcacctgcaggtcggcgatgagctgctgctgggtgcccagggcgtccaccacctcctggatcttctgctccaggtgatcggtctcgcgctccagctccttgctgatgaacaggggcaggcccaggccgttcttgtcggtccattccttgagggccttgttgcgcagcaacaggtcgtactcggtgtggtcggagctgttggtgtacatcgaattgccggccgtcccctcggcggcctgcagcggacgatggtgccagttggccagggcatggtcgatgaagcccacctcgccggcctgcagcaggcgcaggtggaagacgtagtcgccgatcaccggatagtcctcggcgtacagccccacccgatcgtgcacggcacgccggtagaccaggcagatcggcacgatgcggttgagcttcacgaagtcgagcaggcgcatcgcatgcagctcgggccacgacgggaagcgctcataggtcacccagtcggggcccacctgccgctccatcacgatggtggtgcgggtggcgacggcctcctcgtcggggtgggcacgcaggtgcgtgagcgtctcgagcaggaaccgcggctgccagctgtcgtcgtcgtcgtggatgttgacgaattcactgtgcgagttggccagccccacgttggaggcggcctccatgccgtgcgacacgggattgttcaccacggtgagtcgatcgccgagctcgttgcggtagcggtcgagcacggacgccacctggtcggtgtcgccggcgtcgttgaccaccaccagctgccagtcggcccaggcctgctccagcacgtcctggacggcgcggtcaaggaagccggggcggttctgcgtgcgcatgatcaacgccaccgtgcggtcagcaccggcagccggtgcatagcggaagggggcaatcgccgcggcaacgtcgccggtgaagcggtcgacctggtcgagcgcggcagggccccccagtggggcggcgctgtcgggggtggcagcgccgcggggggcctcggccgggttgctcgcgtcggtgcgatcactgtcatcggcggtgtcaatcgcctcgtcgagcacggcaaccacctggtcccaccagcggctggcggcgtccaggcgctcggggcgcacggccagcgcggcgctgcgttcggcgtcggcgccggccaccagggcatcgagcaccgcgtcggcgacatcggcacgcagggcaccggtcgccgggtcccacagggccgcgaagggcaccgacgcgttgctgcggccccagttcgccagggcgccatcgacgcggctgcgggcatagcggccgagggtgatcggcagcaccggggtgccggacagcagtccgaagaccaccggatggaagcgggtggtgagcgcccatcgcgaggcggccagccgggtggtggcgtcaaccgcctgttcgatgggcagcagcgtggcctgatggctcatctgcgcggccaccagcttgtggatgcgcacatcgctgcgcggacggtcgggatcggccatgtgcggcacgaactccacctcggcgccggtgcgctgcgccaggccgtcgatcagggcagccatgatggacacatagtcgtgttcggcgaagggttcggcgttgtcgccgagcgtgacgctgatccggttggccttgggatggtcccagtcggcgtccagcagcacggcgtcgtcgagggtctggaagatcgccggatgctcggggcacagttgcgtggccagccgatagctgtcggcgtcgcgcacgcccaccagctggcacagctcgagcagttccttgagtgcggcgcggtcgctgagcagcaggaagggccccaggctctgcccgctgagcaccaccgggatgtcgaggaaggacgccaccagggcggtggccaggcgctcatagaccagccagccgaagttggagttgaggctgccgccgccaccgatcaccagggcgtcgacgccgcgcagctggttcatgatcttgaacagcttgtccttggcaggcagggccacgtggtttcccgacagcaccttgcggatctcggccaggtagcggtcgcgctcgtccagcggccaggggaaggtgagtgccgggatcgactcggcgtgtggctgcccgccgggtccgtacttctcctgacgcgagatcatcaccacctcgtgtccgcgctgccgcagctgtgccgcgctggcgattccgatggcctcgtcgccgacgtgataaaccgcctggtcaacatcgcacagaagcgctacccgcatacgaaactccttgataccgggacgtgtggccggccggtaccctcgccaccacagatcttttggacgttatcatgcgcggccgcgcgatccgggcgcgcgaaaccggcccccagcgcgcccacgggcgctgcggcgaacaggcgtcgcgcctgctggcgcgccgggccggcggctctcaacgcttgcccaccagcctcatcatcgtgcggtatgcacgctgccgcaggccggtggggaccaggcggtacagcccacgcaccgcgacattgcgcgcccccaccaggtggctgacgaatccggagcgcacgaaggcccgttgcagcgccagctcgctggccagcatctcgacgccgccgcgccgcttgtaggcacccgatcccacccggtagagcaccagcggatcgggcaggttcgtcacccgcgcgccgcactgcagcatgcgggcgaacaaccagtagtcctccatcttcgacaggtgctggtagccacccgcacgggcaacggcactcttgcggtacacgacggtggggtggttgaaggggtcgcggaagcgggccacccggcggatctcatcgccgtcctggggcagccgacggaccatgcccggatggtgctcgtcgtcgttgaactcctggatggccgagcccaccaggtcgtagccgtcgggctcgcccggcgcgtcaccggcgatcaccgggagttggcgtgagaaccggtgtggcaccgagatgtcgtcggcgtcggcacgggccacgatctcgtagcggcatgcctccaggcccagctcgagggcggcggccagtccccggttccggttgatgcgcaccagcgtcacggggatgtcccccacggcgctgccgtcggacgcgtgggcgatcacctcttccaacgcgggcggcaccggtccgtcgcgcacgatcacgatctcattgggacgcaggatctggtcggtgctgatcgacgccagtgcgcgggcgaagaactccggctcgtcgccggcgtagaccggcagcagcacgctgaacgccgtcatgcgggctccttcgccagggcctcgatgtccgactcggcgggggtgccggcaagcacccggccattgctgcgtggcccggcgcgcagtccggcgcgcagtccggtgcgcaggccacgcgacagcacccggcggttgcccgaggtgcgcagcgtgtgcgcccagcgccgcagcgtcgacgcgccgtagatcagcttctcccagcgcgtcagggcgcgggagcgggtgaacagccagaccttgttgcgcacctcctggtagaagcgcggccccggatccgcccccgaatcgccgaacgcccgggtgaggtggcgcacgcggctggccggcacgtagagcccctcatggtggcgcagcaggcgcgcggtgtactcgaagtcgtcgttccacaggaagtagtcggccatcggcaggccgcattcgcgcactgcctcggcgttgatcaggatggacacgaacgacgccgagcggatcgggcggcatcccagccgtgcggcgtcggccttctcgcggggcgaggcgtccagtcgggtgcggggggtgttcatggggtgctcgcggccgtcggaccagtcggcgcggctggccagcacggcaagctcgcggggatagagccgggccgtgtcgagaagggcctgcagggcggtgctggtgggcacggtgtcgtcgtccatgatccagatgccgtcggcccgctgacgcgcaatggcggcggcgatgccggtggtgaagccgcctgccccaccggtattggtgggcatggtgatcacctcggtgaccaccgggtgatcgcgggcgatgtcgccggaaccatcggtggacgcattgtccacgacgatgacggcatcggccggccgggtctggccggccaggccatcaaggcactgggtgagcagctcacgacggttccaggccacgaccaccgcaacgatgcggggcgggttaccgggggtgggcttcatgcgctcagcctagcgattgccaccgacattccgggcgcctgtcggattgccgcgggccgccgatgccggggacgggccggcggccggtcgcgcgcggttcccggtagtcgcgggggcatgtccagggtgccgtgatccgcatcggggcgcacaaatgggcgcgaactccccgcagggagccgcgcccattcgcgtcgccgaaggcctcgcggggacggcgacgtcaggcggcctgtagttccgccaatgcgtcgacgaactcggccttgcgtgagggcccgacgaagcgatagcggatggcgccatcggggtcgagcaggaagacggtgggggtgcggttgatgccgaactcgcgcaccaggtcgaggcgttcctcgccgtcgatctccacgtggttcacgtcgtcacgctgggcggtgaggcccgacagcaacctgccggtggccacgcacggcgcgcacaccttcgacgagaactgcacgaaggttgcggtggaacccagcggtgtgccgagctcggtggggcccagggtgggttcgtcgagggcggcctcacgggcccggccgtcggtgagcttgcggtagccgccgaaggcgagcaccacggccaccgcgccgattgctacccatagtcctgtcatggtgtcatcccgtctgtgtggcgttgccggtggagggccgggagctgccgaagaggcgcttgcccagcaggtacatctcgcacccgaggcagaacccgaacagcgcattgaggcccgctgccaccagggcgaacgcgacggccacgtagaacagcaccggcagcgagaagacgacgccggcaagtccggcgatggcgaaggccagtccgacgccctgggcgaagcggggcgctgcggcgtcctcgaattcgctggccggtgcgatgcgcggacgcacgacgctgcggaagaacaggccgtagggctggcgcgagacgcccagcaccgcgcccgccgcgaaggcgagcgtctggatggccagcacgatcacgccgggccacgggccgagcacgagggcggcgatgagcagcaccgaggtgatcgcggcgccgaagcggggcccgcgcacgtcaacctgcccggggccgggccggacacgcccggtgaggggagcggaggcagctgttgcagacatatggaaactcctgaagcggaaggaactgtgaaggtgagggggattgtgagggggccgggatcgggggactgctggcatcgggtcggtcatcgtgctggggctcccgggtggtgaccccgcggcgatcccgctcgggtctggtgcctccgggagtcggtcggggcgggtgaatccctgcgcgacaccagttggggagaaccggtgtggacaaccagttgtgtggatcacaagtggggaaccagtgcggggaatccggtgtgagggccgaggggtccgtacccggttcggtaggggccgggtcctcacgagcgggacccttcaggagctgggtgctcccgggctctggtccttccggagccgagcgatctcagcggggtggacgtcgcacaggtccggttgttccgggttggtgggtgcgtccacggggatgccaggcgtcaacgccgatgattcagcagcggacggtcagctggctcagcaacaacaggaatgcgaagagtacgcagagctccgcacggcggcgagggcaagtacctgatgcatgtgttgagagtaacaccgtgcgttcagtgcaccaagggtgatcagccagcggctgacaggcgcgcgaagggctgcgggttcttggggctgctggttcttgccgggcgcccatgtccacttagtgctcggtggggcgggcgtcggccggtccacagaagataggtgcggataaagcactgtctacggtgctcaatccgcacctatgtgtgcccggtgtgtgctcgggccgtccgatcatggtctgggacgcgcacccgccgcggccgaatcgcgccgcaggagtcgccacacaccggatcacggcccgggacgaccacccgccgcggccgaatcacaccgcaggagtcgccacgcacccgatcacggcacccaatcacggcgcaccgcacctactcgtcgtcgcggtgcttcttgtcgcgggaacgcttcttcttctgctcggcctcgatgtccttcttggcgccctcgatggcggccaggtgcatcatctcggcctgcgtgggcatcgaataggcgcgcgccgtggtgtcgtgcatctcgatgatcttgcggcgcacccgctcgctgaaggcatgcgcgatctcgccggggtcggcccgcatcggcgagccgtagaccacgtgcacgtcaggacgcccgggcacccagcgcgcccggctcggcggccacgccgcccaggcacccaccagcgcgacgggcacgatcggcacattgtgcgagatcgccagcgcggccgtacccggcttgaaccgacccatcccgccagtacgcgaccgcgtgccctcggggaagatcagcagcgagatgccgctctcgagcagcgccgacgccaggccgcgatggccatgcatcgagccgcggtccacggggaaggcgttcatcagcagctgcgtgccgaaggccttgtaccagtggttgaagaaatagtcggcggccgcaccggtcgccaggttcttggtgagccgcttgggcatcgtcaacatcaccagggggccgtcgaaatggcccgaatggttgggcgtcacgatgaacggcgactccagcccgtcaaggtgttccagcccgtgcacgtgcaccttgatggcggcgtcgacggcaggccttatcagcgccatccgcaccatattgcgggcgatggacgccgtcgtcgacttgtacagcttcgggttgcgcgcgagatccatcagacgtcctccgggcggggctcgtcagggccgccgatgcgattgttgtcgtgctccgactgcacccagtgcgacacccggcggggaagggccaacggcccgtgctgcagcacccaggcggcgaagcgccagcgcagggtgggcaccgaccgcaccttgccgcgtcgcacatcggccagggcgagcctgaccaccgatttcaccggcacccacacccagtcggggatccgcggacgatcaaggcccgccgccgcatggaattcggtcttcacccaggcggtgatcgtcacattggcgcgcacccccgtgccgtccagacgcgccgccaggccctcggtgtagctgttcacccacgccttgatggccgcatagttgtcggccgggatgagggagttcatgctcgagatgttgatgatctcgccgctaccgcgcttgaccatctcgcgtgccgccgcacccgacagcaccaatacggccaggcacatcaggtcaagggcccgcacctgccccgaccagtcgtcgtccagcaggtcgtcgtgggcggcgaatccggcgtcgttcacgagcaggtcgatgggccggtcggcgaagacctgctcgacgcgggcgatgtcgtcgtggtcggacaggtcggcgctgagctcgtgcacctgcacgccgaacttgttgcgcaccgcacgggcggccgatcccagccgatgtgggtcgcgcgccaccaacaccaggtcgtatccgcggcgggcgagctcggtggcgaatgcatagccgataccgctgctgccgccggtgaccagtgcagtaggcatgttctccaatctagccgagaagcggagcgattgacgttccgcaggagcgcagcggacggcccgccgggcggtgccgggcgggccgtccatcaagcagtggggctcaggaagccagcagatgctcggtctgcttggccatggcgagctcctcgttggtgcgcaccaccaacaccttgaccttcgactcgggggccgaaatcaggtgcggggccttgtcgcgggcctcgttcttggcctcgtcgagcaccacgcccaggccggcgagccggtcgcagaccatcttgcgcacgaacgacgagttctcgccgacgcccgcggtgaaggtgagcgtgtccaggcggcccagcagcgccgtgtagccgccgatgtagaacaccaggcggtggatgtacacattcatgccggtgacggcggcctcgtcgcccttctcgaaggcggcctcgacgtcacgcatgtcggtgtcgccggtgagtccgagcatgcccgagttcttgttgagctcggagtcgatgcgctcggtgctccagccctcggagcgcgcggcgtaggcgaacacgcccgggtcgatgtcacccgagcgggtgcccatcaccaggccggccagcggcgtgaggcccatcgacgtgtcaatcggcttgccacccttgatggcgctgatggacgccccgttgcccaggtggcagacgatctggttgagctcgccgaggtcggtgcccaccacggccggcacctgctggctcacgtactggtggctggtgccgtggaagccgtacctgcggatggcgttgcgcttggccaggtcgcggttgatcgcgtaggtgtaggcctcctcgggcagctgcgtgaagaaggcggtgtcgaagatggccacgtggggcacattgcccagcagcgactgcgctgcccggatgccctcgatcacggctgggttgtgcaggggtgccagcggcacgagctcgtgcatggtcgcgatcacctcgtcgtcgatcaccacgggtgcggcgaagcggtcgccaccgtgcacggcacggtgtgccacggcggtcacgttcttcaggccggggccgtggtcgtcgaacatcttgaacacggcctgcagggccacggtgtggttgtgcagctgcggggtgatggtccactcctggccgtcggtctcgtgggtcacgatgccgttgccggcgtcaccgatgcgctcgacgaggcccttggcgagcacggtctcctcgtccgggtcgatcagctggtacttgatggaactggaaccacagttgagcaccaggatgggcttggccatgtttctccttgtcagtgcgtattgatggggcagtgttggtggggtaggaggtgcggggtgttgcgggtgcggcgggcagcccggtgtcgggccacccaccgcgggggcatgtgtggtgcgggcgcgtgggcgtccatggcgtcgcgtccgcagccgccagatcaggccagcgggccggtctcgccctgtgcctggatggcggtcatgatgatcgtgttgacgatgtcgtcaacggtggcgccacgcgacaggtcgttcacgggacgtcgcagtccctgcagcagcggtccgacggccaccgcgttggcggtgcgctgggccaccttgtaaccgatgttgcccgagttcaggttggggaagacgaacaccgtggcgtcgccggccaccgggttctcgggcatcttcttcttgccgaccaccgggtcgatggcggcgtcgaactggatcgggccggccagtttggcctgcgggtcgcgctgggtggcgagttcgtagccctcgcgcacggcgtcaacctcggggcccttgccgctggtgccggtggagtagctgagcagcgcgatgcgcggatcgatgccgaacatcttggcggtctcgttggaggcgatggcgatgtcggccagctgctcgggggtggggtcgatggtgacggcacagtcggcgaacagcagcacgcggtcggccaggctcatcaggaaggcgcccgacacggtcttggtgcccggcttggtcttgatgaactgcagggccggacggatggtgttggcggtggtgtggttggcgccggacacgaggccgtcggcggcacccatgtacaccatcatggtgccgaagtaggcgccgtccttcatggtctcgcgggcctggtcgagcgtgacgcccttcttggcgcgcagctccgcgaacttggcggcgtagctctcgatgagctgcgggtcgttcatcgagatgatcttggcgccgctcacgtcgaagccgtgggccttggcgttggcgatcacttcgtcgcgctcgccgagcagcacgatgttggcggtgccgcgggcgcgggtgatgctggcggcctcgaggatgcgcaggtcttcgctctcgggcatcacgatggtcttgagctcgctcttggcgcggctcatgagctcatagttgaagtgtgccggggtgcgggtggtcaccttggtggctgcggcattggccagcagcggctccaggttgccgtccagactggcggtgggcaggccgttgagggtgggggcggtgccgttcgtgaacacgacgccggccacggtggcatgttccttggcgaaggctgcggtggtggtgcaggcgtaggccgcagcgaactcggggccctgcgcggcatcaaccacgaggatcaccggcagcgccaggtcggcggcgaggctggcgttgagcgccagttcggtgggtgcggtggggccggtgtagtcggttcccaccgcgacgactgctccgtcgatggcggcgcagcgctcgaggatggccgcgcgggcggcgtcctcgtcgttggtgaagtcggtgaaggtggtgcccaccgcagcgccggccgtgtggctcagcggggtgaaaaccgtggtcgaggattcctggcgtcccagcgccttggcaatagcctgtgccgcggaattaaggtcaacgcggccgtcgggggacgcaacaaatacagatgtggtcacaggctgagactacgccgtccgtgctgcgactgcccgcggtccagccagacgcgggttaccggcgatgttcctgcagcctacgcctgcgggcgagcagggtggtgcttcgtgatgcccggtgcggtcgggcagggcgcccttgccgggtggacgcgtccacggtccgacggcactcaccgatcgcgccatggcacagcccggcgacggaacggtgccatcaagagaataacggtgcaattcttcgcgatggggagaatcgcattgtgatcagccggttccgacgcaggtatctgcttggatttccttcactggtgtacatcgcggaggatgtggccacgacggactcgtgaaggcaggaaatatgacatgcccgcaatgcgggcgagcatccgcggcttcgcggtgctcggcgcggcgatgacagcgggcctgtcaattgtggcggggaatgtgaagcggaacaccatctttcgaaatcaattccgcgacagaagtgaatatcggggatccgtgctaccgcgggttctccggacgtgaaaggttctagtaatcatctggttggcatttctgcatgggggcgccagatgccttggtgactggacgggcaagtctctcgcaagcagattgaggcccttcaacgagaagattgtgggagatgactatgaagaagcttatgctatctgttgttgcactgggcttgactatcctcgctgcaaccggatgttccgcgagtccagcaaagcaacttcaaaagggtcctgaggcagatgcctcatataatgcggaggcgtctcgcttggtctggcccgccggatatccggctccaactcctgagtttcataaggagactctggtgaacaatgagcctggtgtaggcgaaggtgctgctgacaccctatggctgtgctcgtgggagaactactatcttgatgcgccctctgcacatgcacaggaaaccatcgaaaggatgcggggattcaaatctctgtatgactacatgcataactataccgaggatgcgcaaaaatactttgatggtgtgctgtcggctctcgagctcggagactcgggccccttggctgcagatgtcgacgcgaactgcattcgtccgcagtgagattcgtcgttgcttgggtccgcgttcatcagtccggggcgcgggctcaagccacgaaggggtgctgcaccacccgctcgactgaaagcgaaggggacgtccgtgttggtgagattcaggaagatgatcgtggctctcggtttgtgtgcgggagtcattgccgtcagtggctgctcgagtcaccatgacgagaacctgatggacggattccagaccgaggcggagtacaacgccgaggcggcgagtctcgcctggcctcccggacgttccgctccaagcccctggcatcacctggagaccgatgtctacaacgagaagggggtcggcgtcaccgacgctgaccgtcagtggctctgtgcctgggaggtccattatttggaagatcccgccacgcggggcggtagtgcgctggccgaactcaagaaattcaagggcctccacgcctacaccaaggcctatgacgtttctgcgaaggaatcgtttgacaaggccctcggctcgctggagctcggcgatgcgggtcccttgcagcgggacgtcactgcgaactgcatggtcgagtgacgctgcttcggggagctccaggcaggacgcctgcgccgcgcgggtccgaccgacgagcgggtgatggtgccgcccgcgcgcgtgcactgcaatttcaagggtggggaggccccaccaggtgatcaaggtaataaagcgaaggggatgcccgtgttggtgagattcaagaaaatgatcgtggttctcggtttgtgtgcgggactcatttccgtcggtggttgttcgagtcaccatgacgacaattcgatggatgggccccagactgaggcggaatacaacacggaagctgcaagtctcacgtggcctcccggtcgtccagctccgagtccctcgcaccacctgaggaccgatctggcctatgagccggggaatggggtctccgatgccgaccagcagtggctgtgcgcgtgggaggtccattacttgggggatccggccacgcgggccagcgactcgcttgcccaactggtcaaattcaaggggatgcatggctacaccaagtcgtatgccgtagaaaccaaggaggcgttcggcaagatgctcagctccctggagctcggcgatgccgggcccctgcagcgcgacgtcacggccaactgcatggtcgagtgagccccttgtgtgggcctccgctgcgaccgggtgctgaccgggctcatctgagcggttgatcattgcgctctgcccctcatccccgggtatgaacgcctgcgaaagctcttgacccaccaggccgggccagtcaccctgaaagcacgaaagaccaagccgcagtgatgtaaaccaccagattcggtgatccacagagggtgcgcggtgcgagaaatgaatgccattcgtcggtaagtcacacacgtcgtgatttctcggcgcgatagtggcgacaggtccgccgcatctcgtgaaatgtctctaaaccagtcctcggcaatcctaagtattcagtggtgatccagggcgcaacgaagggtgagtcgaatggcggttccgggggtgcggcgcgggcggcgtcgtgtggtggggattgtgttgttggtggtggcattggttgctgcgggggccggtgtggtgtggctggtcgttgacggcaccggccacaaggacgcctcggcggtgcgggcctccgcgccggcgggtgggccggcgatggtgtcggtgcggcgtcaggacattgccccggtgctcacgagcacgagccagtcgagtgcgcagccgcattacctggtgacgtcccccgctgcgggccatattgagtacacgcgggggctgaccactgcggtgcaggccgcccagccggcaccggcggcgcaacccgttgccagcgcagccccggcaaccgcagccccggacgatgggacacagtccgcgccggccgcgcccgcgaccacggccccggtggccgcggcgccggtggtgccgaagacggcgtccgatgtgaaggccggcgaggtgctgttctgggttgacgacctggcggtggtggcgccggccgactgcctgctgcagaactgggtgtccggcgaggtcgacgtgccgggcgatattccggtggccgagtgcacctaccccgggttcggcctggtcacccagatcaagccggttgactcctaccgcatcctgtcgggcatcgtcggggccaagggcgtgttcgacgacggcccgggccccttcgactgcccgatgctgccggcgaccggcggtggtgacggtggcaccccgatggtgtgcctggtgcccaccacggtgcccaccacggtgcgtgccctggccggggtgcccgggcgggtggcgatccgcagtcagctggtggccggtgccctggtggtgccgcgcagcgcggtgcggggcctggtggacaccggagtggtgggcctgcaacagggcaaccagatcgtgcagcgcaccgtgaagctcggcgtcaccgacggggccgtggtgcaggtgaccgacggcctggcgctcgaccagcagatcacccgcgacgctcccgaggtcgggtcgtgaccagccgcgtgggccccgccctggcgctggccggggtgcacaagggcgtcgacctgcccgacgggcagcgcctggagatcctgcgaggcgtcgacctggagattcccgccgccagctccaccgccatcgtcggacgctccggcagcggcaagtcaaccttgctgagcctcatgggactgctggcggcccccgacgcgggcaccatccagatcgacggcgtggctgccgccgggctgagcggcaagcagtccgcccggctgcgcaacggccacatcggcttcatcttccagaactattcgctggtgcccacctggaatgtcttccagaactgcgccctgccgctgctgtacagctctggggtgagcggacgccaacaacgcgaacgcgttcgctcggcgctcgccgaaatgggcttggccgaccgtgccgacgccctaccggggcacctgtcgggcggtgagcagcagcgcgtggccatcgcccgcgcactggtcaccgagccgacggtggtgctggccgacgaacccaccggcgccctcgaccagaccaccgccgaggccgtgctcgacgtgctgttcgccaccgcacagcgcaccggcaccgcgctggtcgtggtcacccacgacgaccaggtggctgcccgggcacagacccggcgcgaactcgatggggggcgattcgtcgcatgagaagcttcggtcgcgagctgtggtgggacctgctgggcaacaagaccaacttctggctgtcctgcctggccctgttcgtggcactgttctcgttcatcgccgtggtgtccaccggcacgctcgcccacgactcactgctggccaagaccctgatggtcgacggcgtgcccaccagctaccgggccgagatcgccccggccgcgctgcgcgccaactcgctcaccggccaactcgccgacgacgtatcggcatggaaccgcgccggcctggaatcggccgtggccatggacttcagccaacaactcgccggccaacccatcacggtgcgcgccatcgccggcaactaccaggcgatcaagcgcgtgaagctcaccgacggccgctggaaccaggcgcgtccctatcccggcgaagtcgtggccaaccagcccctcgccgcccggcaggggagcaacacccaattgtcgctcggcaccacctcgggggccgtcgaacccttcgtcgtcaccggatcgctggccgacggcgacgccaggcccgtcgcctacaccgacctgacctcctatttcgccaccacgggctggtatcccaccccggcgacggtcgaactgctgttccacaccgacaagacccccgaccagatcgccgccgccatcgccccgtccctgaccgcactcgggctggcaaccaacgacaagccgatgcgcatcgaccgggtcgactccatggccgaccaggtgaccatgttcaccgccgcattcaccgccgtgacgctcatcggcctggtcgtggccgccctcggcatgatgaacgtcggactggccagtgtgcgcgaacgctcccgcgacttcacgatccgccgcgcactcggcgccacccagggccgcatcatcgcccaggtgctcgccgagaccctcgccaccggaatcgtcgccaccctggccgcgatcggcaccacctgggcactgctcaacgtgctcctgccccgcctgctaccgccctcatgggggctgtccgtgcccgcctacccatggcccatcaccctgctcgccgctgcagccggactcaccatctcagccgccagcggcctcatcccggcactacgcgtccgcaagctcgaactcgccgccatcctgcgcgcctagcacccgcaccatgcctcccgcaccatgccggacgcgcaaatgcccgcccaccccgaggggtgggcgggcatttgcctgcgtcgtcgtgcatgcggcctcgtgcgggcgattccgcataggggaatcggcgcgtggcctccggcgcatggcctccgcgtcaggccagcagtgcgcggatgtcgtccacgctgatcgcgcccgatgccagcgcctggtcgccgaccacctggtcgaagagatcgcgcttgcgctgctgcagcgccaccaccttctcctcgatcgtgttggtcgacaccatgcggtagaccatcacctgcttgtcctggccgatgcggtgcgtacggtcgatcgcctggttctcggccgccgggttccaccacgggtccagcacgtacacatagtcggcctcggtcagcgtcaggccgaaaccgccggccttgaggctgatcaggaaggccgtggcattgccgtccttgaagcgctgcacgcgctcatcgcggtgccgggtgcgtccgtcgaggtactcccactcgatgccctcggtggtcagccggtcgcgcaccaggtgcaggaagctggtgaactggctgaacaccagggcccggtggttctcgccggccagtgcgcgcaggtgctccaccagggtgtcgatcttggccgagccgatgttgagcatcttctcgtccaccaggccgggcgccaggctcagctggcgcaggcgggtgagcgcggcaaggatctcgatgcggtggtggcgggcgtcgcccaacagtcccagcgtgttcatccgctcggcctgcagctggcgatcgtagatgcggcggtgctcgcggcccagcgtcaccggcaggatgaactcctgcttcggcggcaactcggcggccacctcatgcttggtgcggcgcagcatgagcggacggatccgtcgcttcagctcgtcgacgcgtcccggcccggtgccggtctccaccggcttcacatagcgctcggtgaacgccttcggatcggggaagacgcccggcgcggtgatcgacagcagcgaccacaggtccatcagcgagttctccagcggcgtgccggtgatggccaggcgcaggtgggcgcgcagttcgcggatcactgcgtaggtcttggcctcgcggttcttgatgaactgggcctcgtcgagcaccagcatgctccagtcgagtgcctggaactgcttggcgtccagacgggtcaacgtgtatgaggtgaccaccaggtcggcgtccttgatggcctcggccagcggcacacccgacttgcgggaggtctcgtcgatcatcaccacgttgaggcccggcacgaacttcttcgcctcgcccgtccaggcgcccatcaccgacgtgggggcgatcaccagggagggattgcggggacgcgagtcctcgtgcaggcgctccaccaggcacagggtctgcagtgtcttgcccaggcccatgtcgtcggcgaggatgccgccgagcccggcgtcccacagcgcggagagccagccatagccctccacctggtagggccgcagctcggcatgcacgccggcgggcaccggcggggtgggggcggtgccgacgtcgagcaacgcttgcacgcgacgacgccagcgcgccgattcgatcgtggcgattcccgacgtggccagttcctcccacagccccagttgccagcggctgatgcccacggtgccggcgccgggttccaccatcgtggacgcctcctgcaccagcgcgcgcaggggatcgagctcgcggcggtcgagtgccagccacgagccggagtcgaggatcaggtagtcctggccggccaccagcgcggccagcagttcgcgggccggcaccggttcgtcgccgatgcgcacatcgatgtcaaggtcgaaccagtcggtggcggggcgttcctgggattcctcggccgccgaactcacgtcatcggacgcgtcggcgtcggcgtcctcctcgtggccctcggcgtcgcggtcggtgacggtcagccgcacgtcggcggtgccggtgagctccttgaagctggggcgcttgcccacgatgtcgacgcgcacgcgctcgtcggcctgcagcgtgtccaggtagttgctgacgaagtcgagcatgtcgcgtccggtcagcacgctgtgtccggggcccccggccatgtcgcgcagttcggagtacagggccatcgtgtcgcggtccaggcgcacccgcttggcctcgtcgggcgtcagctcggcgacctggccgtcggacgacaggtagatgccgatgtccagggtgagttcgccggcggtgctgaaatcggcgcgcacccaacatccggcggtcggctgctggtcgggctcgacgctgccgtcggtgctcaccaggtccatccggtcgcgcaggaagggcgcgtagaggcccaggaagcgcggcaggtcctcggccgggagcttcagcgccgtgctgtcctccagcaggggacgcaggctcgcgtccacattgtcggccagcggggtgaggcgcagtgcaccgcgcggttcggtgcgcagcaggccgtgcggcgggttgcccagcagcagccatccgctgcggaagggctccaccgtgtcgccctcacgcaggatggtgcgcagttcgaaatccgaggggtccttcgtgtccgtggtgtcatcggcgttcttgcccgagggcttggacgtgcctgcaggccgcgacgcgctcgcggaatggggcgcggccacgatgtcgaggcccagggtggccgggtggtcgtccacggtcaccggcgcccacgcattgtcgccgagcttgtgcaggaaggtgacgccggtgttggcggctcgacgcagcacgcgccacagctcggggggcatccgctccaacaggatgtcgccggcgcggcgtccgccctgggtggccaggcgttcgagtccgcgcagcgcgttgagctggtcggcgcgcgcggccagcgtgatgccggggtggttgatgtcgtgccagctcatgtgggcgcgctgccactcgccgtcgggtccggcacgcagggcgctgatgcgccaccgggagtcggcaccgaagcctgcgacgccctccacctgctcgaactgcagggccagctcgcgctcgccgtcggagtcgaagcggggcagcgcgggggacagcgccgtctcccaggccgccttctcgtggccgtgctgcacgggggcctgcgtggcgaccacctcggtggcgtccgccttggccgtgagcatcagggccgttgcgtgcacacaggggttggggttcccgcagtcgcagcgatcagaccaggtggcgatgcgcaccgggtagccgatcagctggatctcggggtggaactcgtgggtctggccgctgctggaatcggccacgtcggccttgatgcgcccgccgtctgccacgagattcgtgacgacacgagcgccttcgctgagcgcggaagcctgatcgatcagatcctgcccatagtgggcccgcagtattccctccgagagtccacgtagccactgcctagtgatgtccggggttcgactgcgcgcattcatcctttccactctacgtgttgttgccgatcgacgcctgtcgacgacttccggtgggcatcgcccagcaggtcccacgggccccggttcacgctcaggagaccctcttatagggcggccacccggtgctgcgtggtgcggctcccgggtggccctgtgtgctcccacaggaagccggtgggtcggcccgccgaacgctgcgccgatgacagcacggggccgttcctgcggggctgtggggccgccgaccccgtcacaggctatgaaaaccctgtggactgcatgtcaggacactctcaagcttgacttgtgccatggcggcatagccggttgacagcgcggacccaaacgttgttagacctcaattgcctccactgcgtgggggtgcttcccgcaagggtgtcgagctagcgagacgcgagtgatcgttctccggagtactcacggacgtgtcgcggacatccaggtttgaagctttcggtctcaagaaacgaggattcttgcgagttctgtttggaagcgtgcagctgtcgctgcactcgccgcaaccgtcggtagcgtgggccttgttggcaccgccgctgccgcccccgccgacgccaccagcccgacgcccacttcggcgttcgccaagggctcttcctacctgcccggtttcgacaccagctcggatcaggccaagtcggaatggttcttcggccgcgctcgtagccaggctgcctccatcaatggcagccttctctcggcttccggtggcgtgaacctgtacggcgactacgcctactccgattcccgtggcttcaagtacgacaacacgtacaagagcgagtccacggaaaactggggcattctcaacgacaaccagcttgagggtcaggacaaccgttcctactccgccaacgtcgtcatcaatggcgccgttgccaacaactggctgatcaacttcgcttggtcgcccgaggccttcgccacgcacacgctggcaaccgtctctgacaatggtggcaaggcttacgtggcaacaccgccgtcaacaccggcttcttcaacctgaagctcggcaccatccagcaggagagcaactggcccgccgtcatcaacggcaccagcaacacgctcgcctcgtcgcagatcagcgactccaccggttgggccatcaagagcattcttggttgggacggtcagattcttgactggaccggcatgaagttcctgcccgtgctcgatctgggcgtgttctccagcgctgacaacgtgaccctggccgatcaggccaacggcaccaagtcggtcaccgcgagctcgaccctcaaccagggtcagttcagcctgctgggcgacctgctgaagctcaagtggggcgagggcgagcgcaccgcgaccgccaccggtgttgccggtaccgctacggcgaccaccgcaccgctgagcgatatcaccgtgtcgacgatcttcggcctgggcgccaccatcaagcccggcgccacctgggatctctcgaagctgggcctcattggccaggccgcgagcgtccttgctgatctgtccctcggcctgcccggtcagaacaagaccgtggttgccgacgacggcacgcacgctgaagcccaccagaccggcctcggtatcaccgctggcctgaagatcgctgccaacaccggtcagctgctctccttctccgcgaccctcggttcgcaggacgttgaggcgcaggctcccgaaggcggcatcgttcttcctggcgctgagtgcaacactcagtacttcagcgaagtcaccccggacatgcagttcttcaatgacatctgctggctgaaggaaaagggcatcaccaccggttggcctgacggaacctaccgtcccgtcaccccgatcaaccgtgacgccatgatcgccttcatctaccgcctcgctggtagcccggcctacacgcccaccaagcagaccttctccgatgttgacccgagcaacatgtactacaaggagatcgagtggatgcaggccaagggcatcgctgctggctgggatgacggcacctaccgtccgctcaatgacaccaaccgcgacgcgatggctgcattcatccaccgcgctgtgaaccagggcatcatcaccctcaagtgattgatttagcaccctaagtatgtagaagggggtgtcccccacctcaaggtgggggacacccccttctcatgtaatctgtagcgggacaggaaaggttggtttatgagctcggaagacagcacccaggcaggcccccaacgcggcgaaacgcccgatggcggcaacaggaaaaaggcactgatcatcggcgcgatcgttgtcgcggtggtcgtgattgctgcggtcgtgttcttcgccgtgcgcggcagtggtaacagtggttcgtccaagtcggcctctgcagctgcatcgacgtccgtggcccaggcctcaggcgacatgggttcggcctccgccagtggtagttactccggcgtgatgcgctcgatgaccgatgaggagaagtcggccggtgtgcccagcctgaagcaggagcacgttgacatcccgcctgccgagaatggtggcaccggttactgcggtcgcatccaggacttcaagaagttcaccgatgcgaacagccaggccggcaccgtgcaaacagcccaggagctgaatgcacgctggaccgagatggccaatgcggcccagaagatctctgacgaggctcccgaccagggtgccaaggacgcgtggaagaagtacgccgacgccacgaacgcggtgaacaacgccatcggtccggtcagcaatcctgatgatgtggccaagaagctcaatgacccgggctttgccaccgccttcaacaacttcaacagctcctggaacgacctggtgaagaactacaaggacgcgatcgctggatcgtgctccgtcaccctcgtcggccaggcaactgcataagcacctgttgagcccagctcaatcctgaggttcggcccgccatccttcgtggatggcgggccgaacccgttcactggccatcggctcccgatgcgaggacgcgcccgcgtcggcacccgggtcggcaggtgggttgcggcactgcggacttcgcaggcatccggggcaggccatggatacccgggcctgacatttccgggcgagcgagtacgcacccactaggctcgacgcatggcgctattgatcggatcgcacgtagagcaggaagaccccatcgcgggggcaagggtgcgtggcgccgagattgcgcagatctccctgggcgatccacgaagttggaagggcccggtggtggagttccccggcggggcaccggcgctgcgcgaggccgcgcagcaggcgaacctgccgctggtggtgcacgcccccttcgtgatcaacgtggccagcaccaacaaccgcatccgcattccgagccgcaagctgctgcagaagcacgtcgatgcagccgccgagatcggagccctcggggtggtgatccacggcgggcatgtggtcaaggatgccgatccggccgatggcttcgcgcactggcacaaggcggtggacggcctggacgccaaggtgccgatcttcattgagaacaccgccgggggacagcacgcgatggcgcgcacgctcgaggcgatcgaaaggctgtgggattccatctccaccgccgcggcctttgcgcaggtcggcttctgcctggacacctgccacgcccacgccgccggcctggaactgcacggactggtcgaccgcatcaaggcgatcaccggccgcatcgacctggtgcacgccaacgactcgcgtgatgccttcggctcgggtgccgatcgtcacgccaacctgggcaagggcaaggctgatgccgccggcatcgtcgaggtggtggccacctccggtgcccccgccgtcgtggagacgcctggtggcgccgaggaccaagcagccgacatcgtgtggctgcgggacaggattgcacaactatgaccgatcttcgcgaactgccgtcacagccattggcggtcgagccggcgcacgtcggcctgatggtgaaggcgagtgtgcaggccttcggtgaccgtcccgccacgcgagtgctggtgggcaagcgatgggtggtggccagctaccgcgaactcgatgcccgcgccatgcagatcgccgcggcgctcatgtactccggcgtcgaaaagggcgaccgggtgggtttctactcgcgcaatcgtcccgaatggacccaggttgacctggcgtgccagttcatcggcgccgtctcggtgcccatctacgccaccgacaccgtcgatgaggtggtgcacatcgccaatgactgcggcatggtggtggcgtttgccggacgcgccgacgaggccgagcggatgggccaggcgtccgagcgggtggcaagccttcgtcgggtgatcagcttcgacagctgcccgcgcaccgatgtcacctggctcgaatacttcgcgcccagcgaccgtcccgtgcccgagcgggtggtctcgcgcatcaatgcccgactcaacaaggccaccggcgacgacctgttctcgatcatctacacctccggcaccacgggcgccccgaagggcgtcaagctggcgcaccgggccatgatgtcggagttgcgggccctgcaccgcagcttcccgatcagcacccgcgaccattcactgtgcttcctgccgctgtcgcatgccctggagcgcggctggacctgctacctgtgggcgcacggctgcatgaacacctatgtggtggacacccgcaaggtcggcgagatgatgcgcagggcgcgtccgacgctgatggttgcggtacccaagctgttcgagaccgtgctcgccgaggtgcacaaggcgtcggcggtcacgccacgacgcaagcgcatcctgcagtgggcggtcagcgttggccagcacctgcagttcgactaccggcagggccgcaagcccctgctgttatggcgcgcccagctgccgctggccgatcgcctggtgctgcgcaagatccgggaggccatgggcggccagaagacgatgctggtcagcggcggggcacccctgcgtcgcgagaccgaactgttcttcggggcggccgggctgcagatcctcaacggttatggcatgaccgaggcggcgccgctcatctcgtacaacacgcacactgcgtaccgggtgggcagcgtgggacgcgtgatgcccggcgggcgcatcaagctcggcgacaagcacgagatcctctaccagggtcccaatgtgatggacggctactgggacaacgaagaggcaacccgcgaggcattcctcaccgacgacgagggcacttggctgcgcaccggcgacttgggacgcatcgaccgtcgcggcttcctgttcgtcaccgaccggctgaaggacatcatcgtcaccgagggcggcaagaacatctcgccccagccgatcgaagagctgttgcaggccgatccgatgttcgaacacgtggtggtgctgggcgacaaccggcccttcctcacgctgctggtgcagccgtcgatggccaacctgcagaagctggccgaggcattgcacattgactacgggcatgtcagtgagctgttcaacaaccagaacatcctcgatgagatcaagaagagcgccgaggcgttgaccaacaacctgccgaagtaccagcagttccgtgacctgcggatgagcagtgaggggttcagcatcgccaacgggctgctgacgccgacgctcaaggtgaagcgccgtgaggtggagcgtcgcttccgtgggctgatcgacgagatgtacaccaagatcggcctgcaccatgatcccaaatccgcctccggcagggaccccaagtctgcctccggcagggattcgaagtctgcctccggcaaggactcccggtctgcctccggcaaggactcccggtctgcttccggcagggattcagggacagcctcgggcggggaccgcgggcgcgcccacgggcaggacccccgggccacccacggcggggattcgcccaccgcgcgctgagcgctggcgtcggccgcgggcgtcccgatgcgcccccactcagggtgattcgggcaacgcccggccgtgcatggcgaagtcctcctccagctgctccagggagcgtcccttggtctcggggatgaacttcaggtagaagaagatcgtcgcgaagttgatggcggcgaagatgaagaacaggttcccgcccagcgcggcctccagcggcgggaagagcgaggcgaccaggaagttggccatccagttggcgaacaccgccaggcccatcgccttgccgcggatgcgcagcgggaagatctcggccagcatcagccagaagatcaccgccacgaagccctgcatgaagaacaggaacagcatcatgaaggccaacaccaggtaggcgcgggtgggccccggtgcgatcacggtgaacatggcgcccatcagcgccagcgcacaggtgacgccgatctgtccgatcagcagcatcgggcgtcgtcggaaccgcggcagcagcacgatcgacccgaaggccaccgagcagactgccaccacgccgttgccgatggtggccaccagcgcggcgttggtgcccaggccggtgtcgatgaggatcatcggggcgtagtacatcaccgagttcacgccggtcatctgcgacaggaaggccaacgcgatgccgatcagcgtgatgcgccgcatccagggcacgcgcaggtcgtcgaagaagcttgtggacgcctccctgcgcgtccactgcacgtgcttctccagggcattgagctcctcgctcacgtcgtcgtcatggcgcagctgccacaacaccttctcggcgtcgtcgcgacgtcccttcgacaccagccaacgcggcgattcggtgaggtggaaggtgccgaagaacagggccagcgccggcagggtgcacagcaccagcatgaagcgccacgcgtgcggatggccggggaagacgttggcgattaccgcattggtcgtataggcgagcagctggccggtgacgatcgtcagctcgttgcgcgccaccagggtgccgcggatgtgggtgggcgccagctcgccgatgaacaccggcaccgtggcggacgccccgcccacggctagtcccaggatgaagcggaagatcaccatcacggcggccgtcggtgccagcgacgtgcccagcgcgccgatgatgaacagcgcggcgagcaccagcagggtcttcttgcggccattgcggtcggccagtccgcccggcaggatgccaccgaacgcggcgcccagcaccagcgatgaggtgacccagccgaccatgttcgggctcagtgccaggccgccgtcggcggtgggcagcttgaggaaggggatggcccccgagatcacgccggtgtcgaagccgaaggccagtgcgcccatcgtggccaccagcaccacgccgttgatgttcttcttcttgagcccggcatggcccggttggcccgcggcctgacccggggcggacgagggagctgcgtcggccggcggccttccggacgagggggccggggaggtgccggcggacgcgtcggtggagctgacggggttgggcgtcccggtgttggcgggcgcggcggtgttggcaggtatttcggtgggaatgggatcgagctcagtgctcatggtgcaactcctggcaggtcatcgttgacggaaagggagccgtgatggtggtcttcggagcggcatccgccggggcggtgatgccgtggcgggccccgacggccggggatgtttggccgtgctcgggtgggtgttcagccggcgggtgtgaaggcgtcgatgaacgcgtccagtgcccggtcgggatcaccggaggcccaggcctccatggcgaccacgccggtgtagcccatctgttgcagggcgaccgcgatccttgggtagttgatctccccggtccccggttcgcagcgtccgggcacgtcggccacctggatctcgccgatccagggcaggcactgccggcaggtctcgatgagttgcccgtcaccgatctgggcgtggtagaggtcgaggttcatcttcagggccggcgaatcgatggccgacaccagcgcgcgggtgtcgtcgggatggctgaagggggtgccgggatggtcgacgggcaggttgaggttctccatggtgaacaccaccgaggcgtcggcgcccagtcgggcgagttcctgcagggtcagggtggcccgggcccacatggcgccggtgacgtgctcgacgggtgtgacgggcaggccctggtcgcccaggccggtgccgtggaagttcaggcggcccactcccagggtgtgggcgacctcgatggacgccctggccgattcgaggaagtcatggcgtccggtgtcggtcaccaggtcaccggtgaggtagccggtcatggacccgatgtcggcgccggtggccgccagcgcggtcaggtccttgtcgggggcgttccagttccacatctccacttgcaggccgcgcgcggcgatgcgctcgacccgctcgacgaacggcaggtcgagatagaccatctcggcacacgccgccaacgtgaaggggctcgcggtcatgagtgggccccctgtccgtggcggtgcgctggaggtgcggacggcgtcgtccgcgggggctgcgtcggggtctggaatgtcatggatggtgcccacttccttgtcgggctgcaggcagggggcccgtcgttgggttccccggcctgccggcggtgccctgcggggatcgcggtcgggatggcgaccgggttcctgcgcgggcaatgtgtgtgcgagagtggcctactagttcgtactagtagtacgtggttatgattgtaagaacaatcgtcgtcggctgtcaacggtcaaccgcccatgggacaggtgccggggagatccggttcgcaggcgggccggccctcccggggctcgaccagcagggttgtggcgtccgtgggcaccctccggtcccgggatcgggccccgggagccgtcggcaaccggttgaatggatccgcgcaccgggcgcggggtgtcgtggccggcagggacgttgggaggcagtgctcatgagcggttcatcaatggggcgtcgacccacgatgcgcgatgtggccagggcggccggcgtctcgcagtcgctggtgtccatcgtcttccggggcgctcccggtgccggcgcccagacccgcgaccgcgtgctcgcagccgcccgcgagctcggctatgtgcgcgacgagagtgcgcgctcgctgcgcgccagccaatccaccagcatcggggtgtgcttccagacgcgccagcccttccaccacgtgctgttggacgggatgtacgcccatacggccggcacgaaccatccgctggtgttgtcggccgtctcggatgcccgtgacgaggcgaccgccatcaggggcctgttggcctaccgctgcggggcgctggtgttgctggggccgcgtggcgacgagcagtccctggcggcgatggcgggggatacgccggtggtcgtggtgggccggcgcgtggacgaccgcagtatcgactgggtcacctccgacgatgggctgggcatggaccaggccgtcacccacctgcgcacgctgggccatcggcgcgtgctctacttgtcgtgctcccgggcggcgggtggacccgaccgcctgcaggccttccatgatgcggcggctgccaatggcatcagtcggtcggtcaccgtggccgatggcgagatgaccgagcagcgcggggcgcgggcggcggagcggctgctggcggggtcgatattgccgacggcggtgatcgccttcaacgaccgggtggcgctcggcctcatggaggtgctgatccgtcgcggcgtcgccgtgccgaaggacatctcggtggtcggcttcgacgactccgagatcgcccagcgcgatccggtgctgatgacctccgtgcaccaggacgccgagagcctggcccggatagccgtcgagcgggccagccagcgcatccatccgagcagcccgcccactgacccgcacggcaccttggtgcccacccacctggtggtgcgttcgaccaccggcgaggcgccgcggcgctgacctgctcgttgggtgagctgctcgttcggtgggtggccatgctgtgggcgggcatgcagtgggtcggcactggacaggtcggcgttgggcgggtcggcgacaatgggaaccgcgggaacaatcggcgccacgccggcgctgacggctgagtaggcggtgcggcccggcggccgccggacaaggagtcacgatgactgacaaggctttgctcgtggtggacgtgcagaacgactttgtcgagggcggggcccttggctgtgagggtgggaaggcggctgcggccgccatcacgcagctgatcgccgggctcgatcccgccaccgaactggtcgcggcctcgcgcgatgatcacactcccggcagcgacaatggcgggcacatcagcgagcatcccgatttcgtggacagctggcccccgcactgcatcgacggcacgcccggtcaggcctacgcggagccctttgccacggcgcatcgcgatatcgaggtgcagaagggtcagggggtgccggcctattcggcgttcgaggggcacacggccgatggtcgcagccttgaccaggcgctgagggacgctggcgtgacgcagctcgacgtgtgcggcatcgccacggactactgcgtgcgggcgtcggcactcgatgcggtgcgccttggttaccaggtgcggttgctgggcaacctgtgcgccgcagtgaaccccgagtcgggcgccagggccgtcgacgagatgcgggacgcgggcgtcaccatcgtcgcgtgaggtcgggcgtcggcagctgggccctgcgcacgcctgttcctcctcacagtgggcagttgtgcgggaatgacgccgcacaggtgcccacccaagggcccgagtcgcggctgtcagcaggataggtgcggataaagcaccgtggacggtgcttttgtcgaccctgtcttttcccgggggatgccgggacgtcgacatgaccgggcagtgccggatgcagtcctgcgaacgtccgcgctggacgccatcgggcgggccatgcggacgacgctggggatgaatcccacttgatccggcacttcctgtggataactcacgcgcgcggccagttcctgccagtgtgggcggacattgttgccatcatcgtgacgaggaagtccccccatgacccatgtatccgtgacccgtccacgccgcatcggcgcccttgccctggccgcggcggcggccgtcgccctgtccgcgtgtggtgccagcggcatgctggcgcaatcaccaccgaccgacgccgacgtcgccaccggcaccgggccatcggccgggcggcctgccgcaacgaggtcggccagcgcctcggtgaaggccgaccccgccctggcagcgctggtgccccaggagatccgggactccggcgaactggtggtggacagcaatcccaccctgccgcccatgtcattcaaggccgatgacggcacggtcgccggcgtcgatgctgacctggcgaaggccatcgcgggtcggctcgggctgaggccccaggtgcagccgtactcactggacggatccagctggcacgtcattggcaggtcgctgggcgatgccgacatctccgtgtcgaattcggtgatcacggcgtccagcaggtggaattggaagaacgtgcagtacatgaagaccggattgcgatggatcgtgcgcgcaggcaatcccaccggcttcaatgccgatcggctctgcgggcatgccctgcaatatgaggccaactatgacgagggtggaaaccgcccatccatcgcggccgcgcacgtggcgcagcgggtcaaggagtgcgccaagttgggcctgcccgaagcccacgccaatggagtccacaatgtggatgaggaggccaccgccgtgaccgacggcagcgtcgaggcggccgtgatggaatcgccggccgccgaatatgtggtggcacgcagcaatggcgcactcgagctggccggcacccagtgggaggcaaccgtctatggaattcagctgaacaccggggccggcgacttcgccgatctgatcagtcgcacgctggcctcgctggccgacgacggcacctacgggcgcatcctcgagaagtggggcctgtcggcctatgccagcagtgagttcccggtggatccctcgacgcccgaggtcggggagtgaggcccccggcctaccagggccggccgttggcctgccccaccggcctgaccgcgtgcccgccggtgggatatcaggctgttatcagtgcgatcgtgagaagctgtgtgcacacgaatcttgtaggagtcccacaccatgttcatttcgcgcttccgtcgtgcggctgcggtcggcctggccgccgtcaccgcattgtccgccactgcctgtagcggttcctcgtcgtcgtccagctcatccgcgagctcggcgctgccctcggtgagcgcagactccaccctggtgaaccaggtgcccgagaagttcaagaccaagggcaccctgcaggtgggcaccaacgccaccttcgcgccgatcgagttcatggccgaggacggcaagaccatcgtcggcctggacgccgacctgtccaaggccgtggcgtccaagctcggactgcaggtgcagatgcagcaggccgagttcggcaccatcatcctgggtgtcacctccggcaagttcgacatgggcgccagcggcttcaccatcaactccgagcgcatccagcaggtcaacatggtgcagtacatgaaggccggactgcgctgggcggtgcagaacggcaaccccaagaaggttgacgtcaacgacctgtgtggccgcaccgtctcggtgcagcgcgacacggtctccgccgaccagctggccgagaaggccaaggcctgcactgacgccgggaaggccgccatcacccaggtggtcgaggacgaccagtcgaagaccaccaccgacctcaacagcggcaagtccgacgcgatgctggccgactcgcccatcgtcgactacgccatcgagcagagcaatggctcgctggaggccctcggcgacatgtacgacgccgccccctacggcatcgtgctggccaagggtgacaccgacatggccaacctggtgagcaaggccctcgcctcgctgaagcaggacggcacctaccagaagatcctcgacaagtggggcaacagcgccggcggagtcgatgacttcgcggtgaacccgactgtcagctgatcacccccacgtcgaagaagccccacccctccccgtaagatctgtgcttaccggccgtgttggtggggcttcttttcgtccatgtaacaaagtcccagtttggacgccaaatcttccttcgtgccggcgtgcaaagctgagcgaaccacagccaaaaggagcccagatgtcccgctcgtccctgcgtattgccgctgccggcctggtggcagtcacgctgctgtccaccgccgcctgtagcgggtcgtcgtcatcgacctcctcgtcgtcggcagccgccctgccgtcggtgagcgccgacgccaacctgtcgggccaggtgccgcagaagtacaagtccaagggcaccctggaagtgggcatggacgccagctatgcgcccaatgagttcgtcgccgaggacggcaagacgatcgtcgggctcgatgcggacatcgtgaacgcggtggcagcacgcctcggactcaagaccgagcgcgtcaatgccgacttcggcacgatcatcctgggggtcagctcgggcaagttcgacctgggcgccagctcgttcaccatcaacacggtgcgcgaggaacaggtgaacatggtgcagtacatgaaggccggcaccgcctgggccgtgctgaagggaaatccgaagaagatcgacgtcgacaacgtctgcggccagaccgtggccgtgcagaaggacaccacccaggtggacgacctcaacgcgcgctcgaagaagtgcaccgacgccggccagcccgccgtcacccaggtggtggaggtgcagcagtccaaggtgaccgccgacctggtgagcggcaaggccgatgcgatgctggccgattcgccggtgatcaactacgccatccagcagcagggcgatcagctcgagcgccttggcgacatgtatgacgccgcgccctatggcctgctcgtggccaaggccgacaccgacatggccgacctggtgagccgcgcgctcacctccctgaaggacgacggcacctacaaggcgattctggacaagtggggaaatgcctccggctcggttgatgattacccggtgaacccctcagtcggtggctgaaacccgccacgaactgagacactgttgagcgcgccgcccggccagggcgactgagcgggcggaaggacctgacgacaacccatgagtgagcaagtgagcgcgggcacaaccgcacagacagccgagaagcggcccggccgtatcgacgccgttcccgtgcggcacccctggcgctgggtcgcggtggcattcatcgccgtgctcgtcgccatggtggtgcactccttcgtcaccaacccgcgatgggactgggccagcaccttcgagttcctgttccgtcccccgatcatcgagggcctgatcaagggcaccatcctgggcaccgtgatcgccatgatcatcggcgtcgggctcggcgtgctgctggccgtgctgcggctcagcaagaacccggtgctgaaatatgcgtcggccggcttcacctggttcttccgggcgatcccgcgctatgtgttgctgacgatcctcggcgtggggctgatctacctctatcccaccattgacatcggcattcccttcggccagcagatctcgcactggctcggcctgggctgggacatgacctggtggcacatcgacatgcgcaatgtgtccagcggcatcggcatcggtgcgctcgggctgggcctgtcggagtcggcctacatggccgagatcgcgcgcgccggcatcgtctcggtggacgacggccagaccgaggccgccgaggcgctgggcatgagccaccgcaagaccatgcgtcgcatcgtgctgccgcaggcgatgcgcgtgatcgtgccgcccaccggcaacgagttcattgccatgatcaaggacacctcgctgctggccgccatcccggtgggcatggagctgttctaccaggccaccatcatcgccaaccgcacctataaggtgatgtcggcctatgtggccgccaccatctggtacctggtggtgtgctcggtgctgatgttcctgcagagcctgctcgagaagcgcttcggacgcgggttctccaacggcgacgacgaactcaatcccagggcccgacggctgctgcagaagacgggagagcactgagatgagccagggcaacgcgtcacgcagcaccggatcggcgtcgtcacgcggcgaggtggccgcggtcaacgcggtgaacgtgcacaagttcttcggccgcacccatgtgctcaagggcatcgacatggaggtggctcccagcgaggtggtgtgcctgatcgggccctccggctcgggcaagaccaccttcctgcgctgcatcaaccagttggaggagatcgacggcggccgcatctgggtcaacggcgacctgatgggctattacgagaagaacgggcgcctgcacgtgctggacgacgcggcgaaggcccgtcagcggcgtccgatcggcatggtgttccagaggttcaacctgttcccccatatgacggcggtgcagaacatcatcgaggcacccacccaggtgctcggcgtctccaaggccgacgccacgagcgaggcgatgaacctgctcgaccaggtgggcctggctgatcgtgccgagaactatccctcgcagctgtcgggtggccagcaacaacgcgtggccatcgcccgcgccctggcgatgcaccccaagctgatgctgttcgacgagccgacctcggcgctcgaccccgagctggtgggtgatgtgctcaaggtgatgcgcgacctggccgaggagggcatgaccatggtggtggtcacccacgagatggccttcgcccgtgatgtcgccgaccgtgtggtgttcatggacgccggcaaggtggtggaagagggcacgcccgaccaggtgatcaaccaccccagccaggagcgcacccagcagttcctcagcaggatggttgccgacccgcacgtgtgagccactgccccgcaggatgacccgcacacaggatgaactgcatgcagggtcaaactgcacgcggggtcagcgcccatgaagctccgacgaccgccggtccccgtcacggggccggcggttgtgcgttcccgctcggcgctgcttccggctctgttcccggcaggcgcggttcccgacatcctgtttcccgcggccggagcacgacgttcccgccgtcgcaccagtgcggccgtggggtcggcagggcaccggatcgcctgttccggggccgttcaccgtgggcatgaccgcccgggaatgtttcgatacatcgatgagttgtgtggagcatgctcaacgtgatggtcaccacgggacgactggccgggtgggccggatttggatattcggtgtccgcattccccgcgtcggcatgccctgctccggcttcgtccgcgtcgtttcgccctcgagcccacgtgcgtcgtgggcgcaggcccggcgtccatggctcccgcccgacttccgggagcaccgaccggccgtgggtccacacgcgacgttcgctggcggcgatccggaaccccggacttgcgtgaagtcactcgtcgaggtatcttcgatatatcgacgggcgatcgatgagaagaaccggcaacgagcaggaagcccgccagcccgatcaggctcctcgcgcagcaactccggggcgtcagcccggagcgcaagacccgcaggacgggtcccgcggggcaacacggtgagaccaggccacgcaaaccccaacacgtcaacatcaccgggcccgatcggctgagaggccaggccctgcctggatgggtgccgatccgggcccgaatacagataccgggacgcgcgaaagccgtcccacaacacttaaggattcaacacaatgcgttattacttcatgattcaggaagatccaaggtcgggcggccccggtccccgtggccatcacggccatggcggttgcggcggacgtcgggacttcgacggacctcgtggcagggacttcggcccccgcggcggtggcttcgagggtccccgcggtggcggcgactttgagggtccccgtgacggcttcggtcgtcggggtggacgcccgggcttcggcggacgcggtgagggagactcccgtggccgcggcgaggccggtggcttcggtggcgacggcttcggcggccccgagttcggtcccggcttcggccccggtccgcgcggcccgcgtggcggcatgggcttcggcccccgtggaccccaccatggtcatcacggccgtggcaagggacgtcgcggtgacgtgcgcgccgccgtgctgaacctgctcaacgagcagtcgatgaccggctaccagctgatgggtgccatcgaggagaagtcgcagggcctgtggaagcccggtcccggctccatctacccggcgctgcagttgcttgccgacgagggcctgatcaccctcaccggcgccgatgaggcgggcaagaagccctatgccatcaccgacgagggcaagaagtaccttgccgagcaccccgagcagacgaaggctccctgggaccgcgtcacccgcgaccttcagggtgtgctgagcctgcgtcccgagctcgagcagctcgccgcggccgtgcgccaggcagccactgtggctgccgaggcacagcaggccaaggtcaaggacgtgctcacccgggcccgcaaggaggtgtaccgcatcctcgcctccgatgaggacgatgccggcacaaacacccccgatggtgactcgaacaactaaatgccggccaagggtccgtccgacgtaggtcggcggcaaccagaagcacgcgacatcggctgacccgaccggtcagcaccgtgatggccccggcaccctccagcagtggtgggtgccggggccatcgtcgccccccggtggttccggggctggtcgccaatcgctggtttgctcaagcggctttgcccagtgccgattgctcagtgctggtcgggcaccttgtcgaggtcggccagccaggcccgggcattgccgtcggacggcgaacgccagtcgccgcgtggcgacagggaaccaccggccatcaccttcggtccgttggggatggcggtgcgtttgaactggttggccatgaagcgcttgcagaacacggtgagccatttcttgatgtcggccagcgaataggcgatccgttcgtcggcggggaagttcgccggccactcgccgaagtcggcgtcggtccagatgtgcgaggccaggaaggcgatcttcgacggacgcaggccatggcgcagccagtagtagagcgcgaagtcgtgcagggcataggggccgatggtgtcctgggtgctctgcggcttggcaccctcggccaccgggatgagctcggggctgatctcggtgtcgaggatcgactggagcacgcgtcccacccggtcgtcgaactgccccgaggcgatcacccagcggatcaggtgctgcatcagcgtcttgggcaccccgcagttcacggcgtagtgactcatctggtcgccgacgccgtaggtggcccagcccagggcgagctcggacaggtcgccggtgcccagcacgatgccgccacgctggttggcgatgcggaacaggtagtcagtgcgcaggccggcctggacgttctcgtaggtcacgtcgtagtcgtcgagcgggtggcccagatcgcgcagcatctgctccgcggcggggcggatgtccagggtctcgaaggtggtgccgagggcctgcgacagttccacggcgttgttgcgggtgtgggcgctggtggcgaaaccgggcatcgtgaaggtgaggatgtcggtgcgggggcgtccggcaaggtccatggcgcgtgcggccacgagcagtgcctgggtggaatccaggccacccgagatgccgatcaccaccttggccccgccgatggcggcgagtcgctggctcagcgcggacacctggatgttgtaggcctcgtagcagtcctggttcaggcgtgcggggtcggacggcacgaaggggaagcgttcgaggggacgacgcaggccgaggtcggagcggggcgggtgcaaggtgaagccgatggtgcgcatcgcggggcgttcgtggcgggcattgtcgtcgaaggtgccctcacgcagccgttcctggcgcagcaggtcgaggtcgatgtcggcgatcgattcgcccggggtggtggggaagcgctcggtttcggcaagcaggcggccgttctcgtagatcatcgtctgcccgtcccacgacaggtcggtggtgggttcccccaggccggcggcgcaatagacgtaggcggcgaggttgcgtgagctggtcgagcggcacagcaggtggcgttgctcggccttgcccacggtgatgggcgagctggagatgttcaccagcacggtggcgccgcccagggcggccagggagctgggcggcacgggcacccagacgtcctcgcagacctccacgtgcacggccaggtcgggcaggtcgtcggcgcggaagatgaggtctgggccgaagggcgcgacgaggtggtcggcggcgtcgcggggcccctcgccggcctgcgcgcccgggtcgttggcgccccggtggtctgttcccgggtggcgtgctcccaggtcgatgacgccgccctggttggcgccgtcggcaaagtggcggcgctcgtagaactcgcggtaggtcggcagatagctcttgggcaccacgccaagcacgtcgccgtggtgcaggacgactgcgcagttgaacaggcgcgaaccattgcgcagcggtgcgccgacgatgatgagcgcggcgaggtcgcgggtggcgtcggccacggtgtgcagcgcctcgagggcggcgtcgagcacggtgtcctgcaggaggaggtcgtcgattgcgtagccggtgagacacagctccggaaaggcgatgacggatgcccccgtggccgcgatgcgccgggcgtgctcgatcacccgggtggcattggtggcggggtcggcaatggcggtgttgctggtcgcggcagcgacgcgtgcgaagccctggtcatagagcgacgagaaattcatgatgctcctcatctgtgccaccccagtgtcccagaccggtggggtgccggatcgtcggctgccaagggccgtcgggtgcggtggtgattggggtctcaatggaagaatgcaggggtaggcacttgtcggtgccggcatcccggattgccgcgccgagaaccaccggaatggggtcacagatggatctgcaggatttcgtcgagcagtacgccgtcgagcgcaagggcaccgattcactcaaatgggacgccctgggccagcgcttcggcagtgccggcctgttgcccatgtgggtggccgacatggagttcaaggcccccgaggcggtgatcgaggcactgcgaacgcgcgtctcgcacggcgcattcggctacacctatgtggacgatgcgtacttcgaggccttcgacgactgggcggcgcggcacaatgaggcccgcgtgcagcgtgactgggtgcgcttctccaccggcgtggtgtccagcttctactggatggtcaatgccttcacccagcccggcgacgcggtgctgctggcgacgccggtgtactacccgatgcacaatgccgtgaaggacaccggacgcaagctggtgaccacggcgttgcagccagacgagcgtggcatctaccgctacgacatggccgacatggagcaggtgatcaccgagaattcggtgaagctgttcatcatgtgctcgccgcacaacccggtggggcgcgtgtggacgcccgaagagctggtcgacgtgctcgagctgtgccgcagccatggcgtgctggtcgtgtccgacgagatccaccaggacatcatcctgggcgagcggccgttcctggcggcccagcaggtgcaggatggcgcgttcaccgacaacctgatcacgctgaatgcggcgtccaagacgttcaatctggccgggctggtgcactcgcacatcatcatccccgacaaggatctgcgcgcccggtacgacgcctggtcgaagggatatgtgcagaccgagaccaacatcatgggcatcacggccaccgaggccgcatggcgccatggccaggattggctcgacgggctgctggcggtggtgcgtcgcaacgaggccgagttccgccgccggatcggtgaggtggcgccgaaggcggcgatcccgccgttggagggtacctacctgttatggctcgacctgcgtgagtatgtcgaccgccgcgaggtgaagaagttcatccaggaccagtgcaatcttgccgttgactacggggaatggttcagcccggcgtcgcggggcttcgtgcggttcaacctggcgaccaccccgcagattgccgacgaggcgatcagccagctggtggagggcctcgacacgctcgacgagtgagtcgccgcacggaggtgggacgcgatcgcttgactgcggcacgatcggaactattcgcacaaatcatgtggtttttcacacggaccatgggaagatggggtcatgcgtattgtgatgggaagtgaccatgcaggtttcgagctcaaggaacacctgaagggctacctgcaggacaagggtcacgacgtgattgatgtgggcacccacagcacggagagcgtcgactacccggtgtatggcgccggggcggcacgcaaggtggccgccggtgaggccgatcgcgcgatcgtggtgtgtggcaccgggttgggcatcggcatggccgccggcaaggtgcccggcatccgctgcgcgatcgtctccgaggtgtactccgcgcagatgtcgcgcctgcacaatgacgccaatgcgctcgcgctgggtgcgcgggtgatcggcaccggcgtggccgaggagatcgtcgacgtgtggaccaccaccgacttcctgggcggacgccacgggcgtcgcgtcgacatgatcgaggatccgccggcgctggatgcgtaggtgatgtgaggcgttgtgacgagtgcaggtggctccccggatggtcgggggagccacctgtgcgttgggggagtgggctgggggtggctactggccggcctggtccagggccagcacctccgctgcagtggcggtgtcgaagaccacgtgggtggccaaccccgcccgcagcaggccaccgatggcctgggccttggcggggtcggctgctaccaggagtcggatggggatgcgccgcaattgctcgaagggcatgccggtggagcggttgttgaccgcgatcccgtcgctgctgccgtccttgcggaagaagatggcccccagattgccgatcacgtgttcgcgctggagttcggccaggtcctcggatctcaggtacccagagtcgtagaggtgtccgggaaggtcgcctgagggagtgcccaccgatgtgatcaacaggtccgagtgcgcgcgcaggttcagcacccggtggacgctcttctcctgccacatcaggcgacgggtctggggcgaatcgaagaaggccggcacgggaaggtattcgactgctgctccgaacgcggtgccgaagcgttccaggatctgactcacatagtgcgtgtccagcgtcgggatattgcccgaaccgtgtagctgcaccacgtgggtatcggccactggcgtctgtctcaggtaggtggacaggcgtccgatggtggagccccaggcgacggtcatggtcgtgtgggggtggacgaagccggggatccatgccgctgcctcgtgcccgacggcggccagccgggagttcgcgtcgtggggattctcggccagggcaatgcgcgggatcaccgagaagcgctcgccgagttggctggtgagcgtggcggcagagctcacctcccggtgcacacggaattcgatgatgccttcctggcgggcgcgcgcgagttgccgcgacaccgtcgagcgagacatcccaagctcatggcccacttcctcgagcttcaggccgcgcacccagtagagctctgccgcatctgccatgcgctgccggtcgcggacggtcaaggcccgctcgggcgcggacggggctggaaaggactccgccgagtcgctgcgatcggtcatggcgtgactctccttgtgtgtctgcggcgtcgacgtgacatcgcacatgctatccaaatgacactatttcccatatttgaacgtctgattgacggtaaaccagcgagcgtgacacgatctttcacaacgctcgggtctcccggcgtggtcagagtcctagccgtgaactgtgggggaacacatgtcatcgtcgacatccactcaattgccagacaccttggacggctctgcggtcggtgcgcgcccgacccattttcgctgggtcgtcctcgccaccatcttcgtcacctacgtggtgtgcatggccgatcgctccaatgtgggcgccattctgcccatgatcaagggtgagttctccatctcgaacttccagtcgggagcgatctcgagcttcttcttcctgggctacgcgatctcgcagataccagccggcctgctcatgacgaagaagggcacccgcggcatcgtgtcgctggccgtgctggtcttctcaatcatcaccttcctgatgggcttcaccacttcggccatcgcgctgctggtgctgaggctcctgctgggcatcatggaggggcccacccccgtgggcatgacctccaccatcaatgcatggttcccggccaaggaaaaaggcacggcgaccggcatctacatcgcgtcgacgcaatttgccccgatcatcgtcccgccgattgccgtggccctggccgcagccgcgggttggcgttcggtgttccactggttcgcggttcccggcgtcatcatggccgttgtcttcttcttcgtggtgcgctcgcacccgcggcagagcaagcgcgtcaatgcggccgagctgaaccacatcaccagctctgacgacggtaagcgcgaccatggtggcttcggaacgatgccattgatcgacaagatcgtgcgcgtccgcgacgccgaccccctcgacaccaatgccaaggtgctgcggtcgtggaacatctggggcaatacacttgcctacttcttcatgaacaacgtgctctacggcatgctcacctggattccctcgtatctggtggcggcccgcggctattccttcatcaagatgggcttcgtggcctcggccccgtccattggtggactcgtgggcgcactgatcggtggtgtggtgtcagaccgcgtcttccatggtcggcgcaagcccacaatgctcatcacggccctgatgactgctgtcatgctggtcgtggtgctggtggtgccgcagaacaccgtgctggtgatgggtagcctcatcctcaccgggttcttcctgaacatcggatggccgtcgttcacgtcctatgcgatgaacctggccaccgacaagacctatcccttcgcgatctcgatcatcaacagcggcggcaacctgggcggcttcttcgcgccaatgatcgtcggtggcctgctggacgccttcggtggcaactacaccgtcgccttcagctatttcgtcgttgtactgctgctcggtctgggcctcatcctcaccctgatcgaggcccgtccgcggaccgaggtgctcgaggcccagcagatggggatcgaacagtcgtgatcacccgcaccgcaggaaatggccagcaaggaggttgagatgtcaccgataggaatcgttgccgacgacctcaccggcgcaaccacggtgggcgcactgatcgctcgcgagggcgtgacgtcgacggtgctgtttgatccgcgctacatcaaggacagtccccttcctgacgacggcgccctcatcgtgagcaccgattcgcgtgccatggagcccgaggtggccttcagtcgcgtacggcgcgccaccgaggcgttgctcgcccggggcgtcagccagttctcgaagcgaaccgacaccactttgcggggcggaattggtcccgaggtggaagggatgctcagcgcactgcccgatgactacctggcgatcatcgtgcccgccatgccccaatcccatcgcgtggtggtcgggggcttctcgctgatcgattcggagctgttatcgcgcactggggtggcgcaggatgtgcgcaccccggttacagagtcgcacgtgcccaccttgttggcctcgcagttcatggctcgcctggggcatgtgccgatccagtcggtgatggctggcaagcaggccatcaagcacgatctcgtggagttgcggcgtgagggtacccgggcattcgtgctggacgcggtgaccctgaatgacatcgaccagatcgcccaggccgttgtcgacctgcggtggaaggtgatctgcgtcgatccgggaccgctcactgatcggatggctgtgcgctccggagccatcacgccccatgagggcgtggaacgcacccggcggttggagtccgtgcccggcgaaagtggcacggtactgcttgtcgcgggcagcgcaaccggtgtcacccacgaacagttcgctgccctacgggaggttcccggcacgcaggccgtgtcgatcgacgttctccaactcattggcaatgaggaggccgctcagcgggaacagcgccgggtggtcgaccaggtgcgccgcacgatggcgggcgagcagaagccgcgggccctgatcgtggcactggatacggtgctcaccggccatcgtcatgagttgtctgacatggagcaagccagcggagtgaagggccagcaggtgtcgaccctgctgaacacccgcctgggcgaggtcgctcgtggtgcgatcgacgtctttgcgcccgaagacctcgccggggtctacctgaccggtggcgacgtcatggtgaattgctgcagggcattcgatgcccgaggaatcgcattggtcgactatgtgattccgcaggttgaccagggaaccatttccggtggtccctactcaggagtccccctcgtatgcaagggcgggctcaccggaacgagaacaacgacggtggagtccgtgaaccggctcttcgatgaaaggatgagaactcagaatgtctgagacgcgtcggccgaagatggccatcaccatgggagacccggctgggattgggcccgagatcgtcctgaagacgatgaagagcgacatgatctacggggtctgcgatcccttcgtgatcggcagcaaggacagcctgctgcgggcggccgagatccagggtgagacgccgcagttccacatgatcactgaaccggaagaggcgctgggtgagtatggcgtcatcgatctgatggagaccggagtcgcccccgatgcgaagatcgaattcggcaaggtgcagaaggacgcggcgctgcgtgcctactcatatctggagcgctcgatcgagctgggcatgcagggacggatcgatgcggtgtccacggcccccatcaacaaggctgccctcaagctggccggggttccctacatcggccacactgagatctatcaggagctgacccactccccgtacgcgctcaccatgttcaatgtgcacaaactgcgcgtgttcttcgtgagccgccacgtgtcgctgcggcaagcctgcgatcttgccaaccatgatcgtatcctcatgttcctgaagaacatcgaccacgagctcaaggagctgggctttgaggagcccaccattggcgtggcggcattgaacccgcatgttggtgagggcggcatgtttggcactgaggagatcgagcacatcaggccggctgttgaggacgcgcagaagctggggattcgggccgaaggcccgttgtcggccgacgccatcttcgccttcaaccttgatgggcacaacgactgcatcctgtcgatgtaccacgaccagggccatatcgcctgcaaaaccctggacttccagaatgccgtaaccctgaccctggggctgccgttcatgcgcagctcggtggatcacgggacggccttcgacattgccggcaagggtatcgcccagggcgaaagcatgatcgagtccactcgcgtggcctccgtgtatgcccagatgaagctggaccactcggacgcggagtagttgcgtctgagcgcagaagtggtggaacgggacgtgcccggccaggacgagggctctggccgggcacgtctgtgtcgggggcgtcaggttgtccggtgtccccatctggcgttggcccttgacgagcggtctgataggaaatactgtcgatcctataggatcccccaatcgaggcccgcaacgctgccggccgaggagacaacaatgactacagccgacggatggcctatcgcctgcaagatcaacttcggaggaaagacggaggacggcacgccggtcgccgacgctcccgcgagtgcgtggcgggaccagctgatccaggtcgcggaactcggttttgactacatcgatcccatggacgattgggtgccgatcgccgatctgagtccggagcgctatgcagagttcaagcagaccctcagtgatacgggcctgcgggtcgctgcgatctcgatcgggcgcaacagcgtggtcgacgtccagcacggtgagcggaatgtggccacgatccatcgcaccatcgaacgggcggcagacctgggtgcgagcattgtcaacatcggcttccagcaggcgctcacgcccgcccaggagaaggcgctgtggttctggctcgccgagggccaccacgatgatccgaagcttcgtcccctggccatcgagcgggtccgcgagcttgccgaccatgcacagaagctcggcctggaaattgcccttgagatgtacgagaacaccttcgtcggcacgccggatgacgccgtctccttctacaaggatgttgaccaccccgctgtcggactcaatcccgacatcggaaatctaattcggctcttcacgaacgagggtgtagcgcgggtctgaatccgccggcttcgagcagcgaccgagcgatgtagtggctgaggttgcggaagccgagggctgtgccgcggaggtgttcgagtcggccgttgatcgcttcggtggggccgttgctggtgccggggcggtcgaagtagccgagcacgtccgaagcgcgctgtgtgagggtgcgggcgagtttgcggatctcgacgagctgctccgggacgctggcgctgatcttgtcgattgtgtgcgcgaggaagaatctgcccaggccgcggtccttgtcccggtaggcggtgatcatgtcttggtagatgccccacgtcgcttcgacctcgacgtgcctgtcgtcggcgaacagggcatctagccgcgcctgctgcttgtcggtgagcagaccggcaccggtgagcagggtccgtctggcctggtagagcggatcgcccttcatgccccgccggccgaagacgtcgtgctgtacccggcgtcggcagttctccagcgcgtcaccggcgagccggatcacgtggaacggatccatgaccggggccgcgtcgggcagttcttcggcggcggcggtcttgaacccggtgaatccgtccatggcgacgacctcgatcccctctcgccagggcttcggtctggcggcgagccaggtcttgaacacggctttcgagcgtccggcgaccatgtccagcagccgtgccgggccggtcttgtcgcgcaccggggtcaggtcgatgatcacggtcacgtacgtgtcgccgtggcgggtgtgtcgccacacgtgctcgtcgacgccgatcgtggtcacgccctcgaaccgcgccgggtcatcgatcagccgccggcggccctcggcgaggatcgcgtcgttcgcggcggaccaggacacccccagccctgccgcgacacgcgtgaccgagagatgatcgaggaccaagcccgccagcccccacgccaacccaccgcgggagatcttcgcccgtaccggcgcggcggccgtggtgtcctgccgccagacccgcccacacccgcagcatttgtagcgccggacccggatcagcagggtcgtgggccgatgcccgaacggctcatgcgcgagccgacggatcaccgtgtcgcgcggggcgccctcgcatccacactcgcggcaccaccggtccggctccacgacacggcactcgatcaccgcccgatccgggtccagacgctgcccgacagcctccaggccgagctcgtcgagaccgcagaacgtggtcaggcaaggtgtagtgaaagtagggtgtgacacgtcgaggtcttccggcagatggcgagtgtgagaacttccatcctcagggagacctcgacccctacccggccaccgacacgctcaacccgctacaccctcgttcgtgaagagcctctaattcgtctgcaccgtcccatgccaaccttcactgaaatgtatgagaaggtgcttccgtattcgaactattggcatatcaagaattatattcgtgatgaggatccggccaccggaagctatatgtcagctccggtgcccctgaagtatggcgtgatcaactaccgtcaggtgattcgccgcgctctccagctcggttatcgcggcgcgttcatgacggaacactacgggagtgactggctcggcgtcggagccgaaaatgccgactatatccgacaggtgcttcgttcataccttcggtaagaccctgaactgacatcaacaaattctcaaagaggagattaaaccatgtccaaggaaatcaacaaggttgccgttgtcggagcgggctacatgggtggcggtatcgcccagtcgctggcgctgggcggctatgacgtcgtgatcgctgatgctgacgaggccaggactgcagcatcgctggtccgcctgctcggcgaggcccaggaattcgaggaccagggcctgtatccgaagggtgccaccgctgagatcaagtcccgcctcaccaatggcggaaccatcgagaatgccgtcaaggacgccgactttgtggaggaggctgtctttgaacagcctgatgtgaagcaggaggtcctgaagcgcatctccgccgccgcccccgcggatacggtgatcgggacgaacacctcgacgatccccgtccatgtgctggagcctgcggtatcccatccggagcgcttcctgacggtgcacttctcgaatcctgcaccgttcattcccggcgtcgagctggttgcttcccagcagacaagccctgaggcgattgccacggtcaaggagatcctggtgcgctgcggacgcgagggtgcgcaggttgccgacacacccggcatggtgctgaaccgcctgcagtatgcgctgctcaaggaggccttcaacgtcgtggagcagggtgtggccaccatggaggacgtcgacaccatcgtccgcacgaccttcggtttcaggctgggtttcttcggtccgttcgccatcgccgatcaggctggcctcgacgtctatgccgactcattcaagacgtttgagaaggcatacggggaacgcctcgcgactccggagatgctggttgacgaggtgaagaagggtcgtctgggggtcaagaatggaaagggcctcaccggagacttcgacgacgagaccaaggcggaattgatcgcctaccggaacaaggcctacgcaaggatgcaggatctgctgaaggatctcggacctgctcccaggggaaagaagtagtcgagggatcctgattccaggcttcactgatcatcaaaggagatgaatcgtgtctcaacctgtctccgcacccgcggtgaatgagaaggatctgattcgaaagattacgcttcgaatcgttccgttcgtgatggtgctctacaccatcgcctatgttgaccgatcggtcatcggtttcgcgaaattgcacatggctgccgacatcggcttgtcggacacggcatacggactgggggcgggcctgttcttcctgggctacttcctgtttgaggtgccctcgaactatgtgatgcccagatttggtgcgcgcaagtggttcacgaggattctggtgacgtggggcctggttaccatggtaacagccctggttccgaatgccactatcttctacattgtccggttcctgctcggtatggcagaggcggggttctatcccggaatactgtattacttgacgttgtggtacccgcagcgtcaccgtacgaaggccaccggtacctttgtgctggccgcgccgctcgccttcctcattatgagcccgctcgcgggctggatgctgggattggactggttcagcctccaggggtggcactggatgttcctgctctgcggtggcatcgctgtgatcgctgccattccgacgctcctgctgctccatgacactcccgaagaagcgccgtggatgagcaaggccgaagtcgcgtggatcgaagcggaactggccaaggacaaggcgactctgggtcaggtggagcacaagaatcctttggctgccatgaagtcaaagtatgtgtgggtctttgctctgctgttcttcccctcgacggtgggtgtctacgggttgagtttctgggtgcctaccgtggtgcaccgcttctcgggttccgatgtggcgacaggctggctgtcggccattccgtacatcttcgggctggtgggcatcctgatcacttcccgctgggcgagccgattcaaggagaactggatcccgttggccgtgatctttgcgggctcagcagtaggcatcgggatggcgggcgtgctgtccagcccgttgggccaaatggcctcgatgtctgtagcggccttctgcttgtactcgattgccggggtgttctggccgctgcccacgcgctacctggtcggaggatccgcagcggtggggattgccttcatgaactcgttcggaaacatcggaggtttcgtcggcccctacgtggtgggagcgatctcggatgccactggcgcggcgaccaatggcatgtatttcctgtccggcgtgctcttccttggtgcgatcttcacgcttgtcgtgcggaagttttgggagggccgcaacccggagccactggtattgggtagcaaaggacccatggcggaggcggcctagctgagtagttggtgaacatgtgaatggcgggacaccccaaggtgtcccgccattcacatgttccaacccggtgaggtcgacgcatataacgcgtgaccgcagcgggtgactatctaggcgtcgggagagaccgaggactccggggcggtcgcccgggcggtgaggttgccgaggtgcgcattcagggcggcaagggctgcgtcagagtcttcgtcccggacggccttcaggatccgaccatgctctgccaacgcgaccggggcgtccgtagtgcccatggacgtggtttggcgcatgcggtggaagctgaacgacagcgaattcaccgcgcggtcaatgtagcgattgtgcgcgtggttgagaatcgcctggtggaatgcccagtcgctcgtgtagtagttgtgcaccttgtcgtgatcgcgcactgcgcccggctcctcgagggctgtcgtggctgctttgtgcagggaaaaggcttcttccaggtccggcagaagttctgcaggctccctcatggcacgttccagggctcctcgttcgaagacgaggcgcgcgtcgatgagttcggtcatttgctccaccgacagcggtggtgcgacccgatagccgcggttcgcctcccgtcggatgagcccggtgtgctcgaggcgcgcgagggcctcccggatcggagtgggggagatcttcatctgccgggccaaggtctcgatgcccaagggtgcatcggcggcgaggctgcccgacgtcaacatgtccaggaggaggtcatacacctcatcgaccagggcgcgtgatcgcaacggcgcgatttgtgagagtccgcgaccggctgaaggcacggcattaagggtatcggttggcacatttcctcactgatggggttgtcgtagtcacctggggatgtccatgacttgtgagtgcagtgcctcagggtggcgtgggggcaccggatactctccggcgcgcacgtccttacgcagggcaccgcgcacccattaaatatatcctatagcattagcatcgtcgccgggggggtactcgatgcctccggaccccgcatccttatcgggaacgtctggtggttcgaacccgttctcgggcgcttctctgctcgcaatggactatggtcgcgaagccatcatcaaggatgagtggaagcgggcctatgacgacaaggacccgggcatcgtcatcgcgaagatgctgaagctggacaagatcgaacggtaggaccctgattcggcgagagcttcccctctgtggctatattctataggattaagggcctcagtaggggtgcccttaccccacccaacgacgtggagcagaacgatgacgtatctggtcaatgatcccaagcagttcgccgccgacagcctgaccggcatggtggcggccaacgaggactacctcacagaggtacatggcggggtgacccgcgccaccgatagtccgcagggcgaggtcgccgtaatcgtgggcggcggatcgggccattacccggccttcgccggctgggtcggccccggcatggcccatggtgccgtctgcggcaatatcttcgcctcaccctccgcctcgcaggtggagtcggtggtgcgcgcctccgaccacggcggcggcgcggtgctgttgttcggcaactatgccggtgaccgcctgcagttcggcgcggcacaatcccccctgcgtgccgacggcatcgacacccgcatcgtcaccatctccgacgacatcgcctccgacaccccccagaactggaaggaccgccgcggcatcgcaggcgacctgttcgtggtgaaggccgcctgcgccgcagccgccgccggacgcggcctggacgccgtcgaggccgccgccaacagggccaacgaggccacccgatcaatgggtgtcgccttcaccggctgcaccctgcccggcgcggacgagcccctgttcaccgtgccggaaggcgaatacgccctgggcctgggcatccacggcgaacccggcatctccagccacaagatggataccgccgagggcatcgcgacgctgctggtcgaacgcgtcctcgccgaggagcccgcccgcaccgccggcggctacgacggccacgtcgccgtgctggtcaacggtctgggcgccaccaagtacgaagagctgttcgtgctctacggcaccgtgaagaagctgctcaccgagcacggactcacgatcgtgcaccccatcgtcggcgagcaggtgacatcgctcgacatggccggggtctccctgtccctgatgtacctcgaccccgacctcgaggaactgtggctcgcccccggcgactcgcccgcctacaagaccggcagcgtcaccgccggtcagcgccgcgaggtcgtcgcccatgacgagaaggtggcgatccgggccggcagtcccgaatccgccgcccaggccgaggagctgctcccgctgctgcaggccctcgcagagatgtcgagcgccaacgaggcgtcgctgggcaagctcgactccatcgccggcgacggtgaccatggccagggcatggtgctgggcagcagcgcagcgctgaaggccgccaagcaggccgttgccgcccatgccggtacgtccaccctgttcgacgtggccggcgccgcctggtccgagggcgccggcggcacctcgggggccctgtggggcgccgccctgcgcgaactcggcgcgatgctctccgacaaccaggccgccacggacgaccgtctcggccgggccgccatcgctgctgcccgccgcttcgcccaactcggtgaggcgcgtcccggcgacaagacgatggtggacgccaccgccccgttcgccgacgagctcgccgcgcgcctggacgccggcgacgacctcgccacggcatgggccgccgccgcgaaggccgccaccaagggcgcggaatccaccgccgacatggtggcccgcaagggacgcgcgcgcacgcacggcacggcctcgctgggccatcaggaccccggcgcggtctcgttcgcgctgctcatgtcgggattggccgaccggctcgcgaacagctgataatcacgcgaagggttgtcgcgcccggccccggtcaggcgcggcaccccccgcatcgtcgatgaggagaatgcatgctctgggttggaaccagctggaagatgaatggcacgcgcgcgtcgtcacgcacctatgtggaggcgctcaagcaggccgaccacagcgcctgggacggggtgcaggccttcatcatcccgccggccaccgtgctggccgaggtcagcgagctgctcggccccgactccgatgtgctgctgggcgcgcagaacgcgcactgggccgacgccggcgcatggaccggtgaggtctccgtgccgcaggtcgccgacgccggggcacaactggtggaggtgggccactccgagcgtcgtgcgaacttcggtgacaccgacgaggtggtcaacaagaaggtgcgcgcgatcatcggccacggcctgcgtcccgtgctgtgcgtgggcgaatcccaggaggtcttcgacgccggcgactcggtgaagttcatcaccgatcaggccgattccgccctgcagggcgtcgacccctcgtcggtggtcctggcctacgagcccatctgggcgatcggcgagcatggacgcgaaccgcagcgcgacgacctcctgcgtgccttcgacgcactgcagtcgcgctacggcgacgcggtgaccgcagtgatctacggcggctccgcgaatccgggcaatgcccgcgagctgctggggatccccggcgtggagggcctgttcatcgggcgcgccgcctggaccggccccggctatgtgcagatgctcggcatcgccggcgaggtcgcccgcgcccaccagggatgatgtgatgtcgggccggtgaccccggcccgaccgaaatccggttgcgtaccttggatagcctgagcccacaaccggcagccggggcggacgctggcagcagcactcacccgcccggcgtcggcgggcgattcgagggacgaacactgaggggcaacacggcaatgagcgtcagcagttctcacaacggtgtcgagaagcgccatctggaaggccagaaggaacgccagctcgccatcgccgagatggtgatcaagcagggcaccatcagcgtggaggaccttgccgcgctcaccggcgtctcgtccatgacgatctaccgcgacgtcgcctcgctcgaggagagcggcgtgctgcaacgccaccgcggccaggtggtggcggtcgccagcggcctgcacgaggccgacgccgagttccgggtggaacagagctcccaggaaaagcagtgggtggcggccaaggccggccagctggtcaccccgggcagctcgatcatgctcgacgattcctcgtcggcggtgtggctgttgcgttccctggccgacctgtcgtcggtgtcggtggtgaccaactcgctgctggtggccaatgaggtggccgagaaccgttcgacgaagctgttcgtcaccggcggcgaataccaggcctgggcgcacgcgctgatgggccccaccgtcgtgcagaatgtgcgcgccatgcacgccgacatctgcttcctgtcggcctcgggcatctccgacctggcctgcttccacccctaccaggaggtggttgaggtgaagcgcgccatgttggaatccgccgaggtgcgggtgctgctgctcgaccacaccaagttccaccggcgcgccctgttcaagttcgccgacctcaccgagttcgaccatgtggtgctcgactcgggcaccccgcaagcccagatcgacgagctgaccgacgccggggtgcagctgatgattgccgacgacccgcgcccggggtcgtcgctctgagtgtgaccacccaacgaccatgacccatccgggcgggtgctcgtccggaggcgctgtgcgcaggggacggtgccgccgagggatcgacgctggggggtgacggggcccggcacatggccggtgcccctgatcaccgattccggatcagccggccggacgcacggacaggtagtcgacattcgcgccgggacgcatctcaagggccagtgccaccgtccgggcgacatcggccgcgtgaaggtacttctccggctggtacgtgccgccgagcagctcctgcatggtcacctgcatatcggtgtccacggggccgggatggatcgaggtcacccgcacctggccgcgttcctcgtcgcgcaggccgttggtgacggccaccagcgcatgcttcgtggccgaataggcggactggttggcgcgggtgtggaaacccgagcccgagttgatggcaatcacctggccgtgcgacgcgcgcagctggggcagcagcttcgacgtcagcgccgccaccgccaccacattgatctcgaacaggtcgcgccaggcctgtgggtccatctcggcgatcgggcccaccacgatgccgccggcagaatgcaccagcgcgtcgagttggcccacgcgggcggccgcgtcggccatggcggcgtcgtcggtgaggtcgaccacgaagggctcggcgctgggtagcgaggccaccagctcattgacggtgtcggcatgcgtgccgcccaccaggatgtgccagccctcggccagctcttcggcgatggcccggccgatgccgcgggtcgccccggtgatgagaaccgatctgcgttcagtcatggcccaaccctaacgaagccggctccggcccgaggtggccctgagtggtcacttgtgcggcgtcattgccgcacaagtgaccactcagggcttggggctgctgcttcgggcgctgcctggttccgcggccaccgcggcgtcacggtgaaggcgcaaccccaccgtcggggatggcggtgtgaacgggacatgtgaatactggtgttcgggtgccagcccgctgtcagtggcgcgtccagagccgctcgcacggcccatctggggcgtgatgtgcccaaactcacaacggttcacccacaaactctcacccccggggtggtttccaccacattccgtgttatcttgagcgtcagacaaaacgtccggtgtgggcgtcggagcctgtaccgaccagcgatgctcggaggagtcatgggattcaaggttgcagtggccgcagacgcggctggtgtggattacaaggaagccatcaaggctgacctcgaagctgatccgcgcgtggacgaagtgatcgacgtgggcatcgcccccggagagaccaccccgtacccgcgcaagggcattgccggcgcacgcgtgatcgccgaaggcgacgccgaccgcggcatcttcgtgtgtggcaccggcatgggcatggccatttcggccaacaaggtgcccggcatccgtgcctgcaccgcccacgacagcttctcggtggagcgcctggtgatgtcgaacaacgcgcaggtgctgtgcctgggcgaacgcgtgatcggtctggagctggcacgccgcctggcccacgagttcctcgattacacctttgaccccacctcgcactcgaaggccaatgttgacctgatcgtggagtacgagaaggagaccggagccgacgacaactcagtgacgagctgctgacggctcgctgacaacgccgccgagggccggcgacactctcccgagtcacctcgcgggagcggcccgaacacggggaagtcggcacccagggcgcggggctgaaaggccccgcgtccaccaaacccggcgaggcctccggcctcgcgttcacataaaacagcgaggctggcaggcaccgcccccaccgggattcccggggggcgatggaaccgagggattccgcgtctgccaagatcagcgggcggcgccacggcgtcgctccacaggcttgtcgcgatgggagtcctcgtctcccaccgggacaagaagaaatgtgcaagcaggaacaggtagtaactcgtcgggttcgcccggcgacggccatatgcacgtcgggtggggcatccaggggggtgctccacccgattcaatgaagaatcggccaagcagtatcagcaacggttgtgggcccagcccacctcacagattggaacatcgatgttcaccgcttctctgggagtcttcctcttcgggctcctcgctgcgatcgccggtggtgcggtcggcgccgccatcggcggcaactacgcattcgtcctcactggcttcgccgtcatcgccagctggggcatctttgccgccacgggaaacaccttcgggcttgattacctggcgttcggccccttcatgggcccccacatcgcattcgccggtggtgtcgccgccgcgatctatgcgcgctaccggggctacttcgaggatggcaaggacgtcaactcgccactcgccggcctcggcaagcccgacatcgtctacgtcggctcgctgttcggcatcttcggctacctgtgccagatcggcgtcagccacatcccgtggttcggcacccacaccgactcggtggcactgtcggtgctgctgtcaggcctgctggcccgcgtcgtcttcggcggcctgcccggcaagggcctcatgaggggctcgctgcacaacgccgaggccttccaccccgacgccacgaccttcccgcagaagatcaagccgggccccaacggccgctggctggaatggcaggagaagccctcccagctgctcacgatcggttcgctgttcggcatcctggccggtggcgcctccctgttcctggccggcaacgtcggtgcctacctcaccgagcggggcttcgccaacaccctggccgccgccaacgccaacagcttcaccttcggcatctcggccatcgtgatcctgttcctcatcaccaaccgcaacatgccggtgcagcaccacgtcaccaacatcgccggcctggccgccatccagttcttccccatcctgatgggcaagaccttctccacctacacctggaccgccaccagcacgtgggactcccacacctggctgatggccttcctggcactcatcatcgccgccgtcttcggcgtgttcaccgcactgctcggcgagttctgcgcccgcctgtggtacgaccgcggcacgagccatatcgaccccccggccgcctccatctggctcggcaacacggtggtcgtctcgctggcgatgttgttctcgtgaactgagcacgtgcagacatgaccgcaaccggatccatccgtcgtacaggagacttccccatgagttctgacacctcaactgctgacatcatcaacgtcccgacagatttcgcacaggcctatgtgttcgacctggacggcacgatctacctcggtgatcaactgctgcccggtgccaagcgcatgatcgaagagctccggcgacggaggattccggtgcggttcctgtcgaacaacccgaccaaggaccccgagcaatacgtcgagaagctggccaagctcggcctgcccaccgacatcgaggacatctgcaacaccgtggtcaccaccacgcgctggctcaaggagaaccatcccgacgccaagctgttccccgtcgcggaggagccgctcaagcgcgccctgcgcaaggcggggttcaccctgaccgacgacccgtccgagatcgacatcgtgatcgcctcctatgaccgcaccttcgactaccacaagttgcaggtggccttcgacgcgatgtggttctacaagcgggcattcctcatccagaccaaccccgaccacttctgccccttcccgggcggacgcggcgagcccgattgcgccgccgtcgtggcggccatcgaggcctgcacccagatgaagtcccaggtgaacctgggcaagccctcgccgatcatgctcgccgaggcacttcagggtctcgacgtggaggtgtcgcgctgcgtcatggtgggcgaccgcctgcagaccgacatccagatggcgctggacaccggcatgggctcggcctgcgtgctcaccggagaagccacccccgacgacatcaggggcctggacgatgcacatcaccccacctatgtgctcgaccgggtggaccagttgatccccgcgtccgcgtggcgcgagctcggctggaccgaagacaacgactaacgctcgtctcatactcaaggaagagaacgaaatgatcggcaataccaacggctccgggccctacgtgatgggcatcgactacggcaccgaatcgtgccgtgtggccatctgtgacctgcgcggacgccccatcgcgatcgcgtcaaccgcctacgagaccacccacccgcgtccgggctgggccgagcagaaccccgaggactggtggaaggcgctgcaggcgtccacccacaaggtgctggccaacgccggcatccccgcctcggcgatcgccggcatcagctacgacgccaccaccctgaccctggtggccatggacgagaagggcgaggaactgcgtccggccatcatgtggatggacgtgcgcgccaccgagcaggccgcccgtgccgccgactccgattcggtggccaagctgtacaacggcggcggccattcgccggccatcgccgagtggttccccttcaaggccgcctggctcaaggaacacgagcccgacatctacgcacgcgccgcgcacctggtggacgcgcccgactgggtgacctacaagctcaccggcgagtggaccaccaacatcaactcggccgcactgcgcatgtactacaaccgcgcccagggcggctggcccaccgacttctacgagaccatcggcgtcggtgacgtgttcgagaagatctccgaccgcgtgctcgacctcgggcagccggttggccagctcggcctgatccccgcccagctgctgggcctgcgtcccggcatcccggtggcacagggtcccgccgacgcctgggccggccagatcgggctcggcgtgctctcgcccggctcgatggccctgatcaccggatcgtcgcatgtgctcaccggccagaccgacaccgagatccacggcaagggcttcttcggtggctacagcgacggcgtgatgcccggccagttcaccgtcgagggtggccaggtgtccaccggctcggtgctgaagtggttcaaggacaacttcgccgccgacgtggtgtcggccgccgagaaggttggcctcaacccctacgacgtgctcaacgagaaggcccgcggcatccgtcccggctctgacggcctgatcatcaacgagtacttccagggaaatcgcacgccctattcggactcgaaggcgcgcggcatcatctggggcctgtcgctggcacacaccccggcgcacatgtaccacgccatccaggaggccgtctgctacggcaccgcccacaacctgcgcgccatgaaggccggcggcttcgacgtggagcgcatcgtcgcctgtggtggcgccaccaagagccgtgactggatgcagatgcatgctgacgtcaccggcgtgccgatcacgctcaccgaagtcggcgacgccgtggtgctgggcacctgcatgctggccgccgtcggcgcgggcctctacaaggaccttcccgaggcgtcggagaacatggtgcacgaaatcgacgtgatcgagcccaaccaggccgtgcacgacgaataccagttctacgtggacaagtactgcgacacctacccccagcttcagtccatgatccacgacatggtggaccacgaggctgcacagaaatgattggagaacttcatgtctgatctcattgcgaaggccctggccgacgctgacgacaccgatgtggtggtgatgggccagaatgtgttgcccgacaccggaaaggtgttcaagcagctgttcggaaatgcccacgccattgtcgtggccgacggaatcacctggggcgtggccggcgaggccgtcaccaagtcgctgaccgacgccgggatcaccctcgacgagccgttcgtcttcccgggccatcccacgctgtacgccagctacgagaacgtcgagaaggtgcgtgaccacctcaaggccaccgacgcgatcgcctgttcgatcggctcgggcaccctcaacgacctggtgaagcgggccagcgatgagctcggacgtcgctacatgaacgtctgcaccgccgcctcgatggacggctatgcggcgttcggtgcgtccatcaccgagaacggcttcaagcacacgatgagctgccgggccccgcagggcctggtcgccgacctgggcatcatggccgcagcgccgcagcgttgcactgccaccggcctgggcgacctcatcgagaaggtgcccgccggtgccgactggatcctggccgacgaactgggcatcgagcccatcgacaagggcacctgggacctggtgcagggcccgctgcgcggtgcgatcagcaacccgcaggcgcttgccgacggcaacccggaggccttcgacggcctggccgagggcctgatcatgtcgggcctggcgatgcagaagtaccgcatcagctcgcgtcccgcctcgggcgccggccaccagttctcccacgtgtgggagatggagcacctgggcttcgacgacgatccgccgctgacgcacgggctcaaggtgggcctgggcaccatctcggtgctggcgctgtgggacaagatcctcgacatcgacttcagtgcgctcgatatcgatgccgccgtggccaagtggccgaccgccgacgagcaggaagccatcgtgcgcaagtcgttcaccggcgccatgctcgagccgtcggtcaagcagacgatggccaagtacatcgacgccgacgccctgcgcgcccggctggcgatcgtcaaggagaagtggcccgagatccagcagcgctgccgctcgcaggtgatgcccgcggtggacgtggagtcgatcctcaagcaggtcggcgcggtctaccatcccgggcagatcggcctgaccgaacagcgcttccacgacacgtactaccgtgcgcgcctgatccgcagccgctacaccctgctcgacttcctgttcgagaccggcgtgctgcacgacgaggtggagaagctgttcgcaccgggcggcttctgggccgagcgtccctgggacggccagaagtactggaacgagtgagttgaacggttggtgggtggatccggcgtgccgggtccacccaccggcacggcccgtcggcaggcggggtggccgtttcgcgcggcaggtagaatcattgcaatgaataggccatcgcggtaacgccggaatgcgcgccatggtggatatcgggtgcgtcgcaggacaattcccgttccggggcatttccccatcaacaattcttacacggtaggacttacaaggaagtaggaccccatgtctgaccagtttgtcatcgggcttgatttcggcaccttgtcaggacgcgccgccgtggtgcgcgtcagtgacggaaagatgatgggcacggcggtgcatgaatatccgcatgatgtgatgaatcgcaccctgtcggccgccgatggccagacgctgccccccgatttcgcgctggaggcgcccgacgactacctggaggcgctctactcgtcggtgcagggtgcgctcgccgaggccggcatcgaccctgcgctggtgatcggcatcggcgtggacgtcacctccgccaccgtgttggcctgcaaggccgacggtacgcccctgtgtgacctgccggagttcgccaacaacccgcacgcctggatcaagctgtggaagcaccacggcgcctatgagcaggccaatcgcatcgtcgaactcgcgcaggcccgcggtgaggcctggctggagcgctacggcggcatgctgtcgtcggagctgaccctgccgaaggtgctggagaccctcgaggcggcacccgaggtgtatgccgccaccgaggtgttctgcgacgcggtggactggctcacctggtacctcaccggacagctggcctatgccgccggcgactccggttacaagcgcatgttccaggacggcagctatccctcccgcgagttcctggccgagctcaacccgggcctggccgacgtctacgccgagaagatgaatgccccggtgctgccgctcggtgcccgggccggcggcctgcgggccgacgtggcgcagcggatgggcctgcccgcgggcatcgccgtggccaccgggaacatcgacgcacatgtcaccgcgcccgctgccaaggcggtggagaacggccagatgaccgccatcgtgggcacctcggcctgctacgtggtctcgggcccgcagatggtgctggtccccggcatcttcggtgtcgtcgagggcggcatcgtcgacggatcctggggctatgaggccggccagaccgccgtgggcgacatcttcgcctggttcatcgagaactgcgtgccggccagctaccaccaggaggccgaccagctgggcattccggtgcacgagctgctcacccgcaaggcggagctgcagcaggtgggggcccacgggctgatcgggctcgactggcacaacggcaaccggtcgatcctggccgacgcccaactcaccgggctgatgctcggacagaccctggccaccacgccggaggaccagtaccgggcgctgctcgagtcaagcgcctttggtgcccggcgcatcatccaggccttccgcgacgccggcgtggccgtcgacgaactcgtgatggccggcgggctggtgaagaacaggttgttcatgcagatcatggccgacgtcaccaagatgccgttgtcgctgtgcaccgccccgcagcccggcgcgctcggctcggcgatcttcgccaccgtggcggccggtgcctaccccgatgtgcgcagcgcgtcggcggccatgggctcgaaggccgagaacgtgaacacgcccgatcccgagcggtccagggactacgacctgctgtatgccgagtactcgcgcctgcacgactacttcggccgcggtgcgaacccggtgatgcaccggctcaaggagatccgtcgcgacgccctggcgagggcccagcgcatcgacaatgccgagctggtggccggtgccgagcagctggcgaacgcccagcagccggctggtgccgagccgttggcgggcgatgggcagctggcgaacgacgggcaggccatgtgacagctggccattgcgcggaatcgggtgcccccggggcgccgaccttgacatcttcatggttggcccgccccgataaacaggcacaatggaagggaagcaatgaatcggaggatacaaggatgagcgacctgaagtggactgacgaagatcgcgaggcggtcaacatcgcccgcacactggccgcggatgccgtggaggcagccggcagtggccaccccggaacggcgatctcgctggcaccgctggcttatctgctgtatcagaaggtgatgaacgtcgaccccgacgacgagcactggatcggtcgcgaccgcttcctgctgtcggccgggcatgcctcggtgctgcagtactcccagctctacctgggcggtctcggccttgagctggaagacctcaagtacctgcgccaggcgggctcgcggactcccggccaccccgaatacggccacacgaagttcatcgaggccaccaccggcccgctgggcgccggcatctcgatggccgtcggcatggccatggccgcccgtcgagagcgcggcctgtacgacccggacaacaccggggccagcgtgttcgaccgctacgtctactcgatcgccggcgacggctgcatgcaggaaggcgtgcagtccgaggccgcgtcgctggccggcgtgcaggagctcggcaacctcatcgtcttctatgacgacaaccgcatcaccatcgagggcaagacccgcatcgccttcgatgaggacgtcgaggcccgctacgccgcctacggctgggatgtgcagcacatcgactggaccaacggtggcgaccactacgaagagaacgtgcaggccctgttcgacgccatcgaggcggccaagaaggtcaccgacaagccgagcctgatccgcctcaccaccgtgatcggctggccgctgccccatatggccggcagtgcccatgtgcacggcgccgccatcggcgaggacgagatcaacgccatgaagaaggtgatcggattccccaccgagcccttcaccttcaaccaggacatcgttgccgacacccgcaaggccctggccgagcgcggcaggagcgcccgggccgcctgggacgagcgcttcgcggcatggcagggctcgcatgcggagcaggccgcactgctcgaccgcgtgctggcccgcaagctgcccgacgacctgcaggtgcccagcttcgaggccggtgcggtgagcacccgcaaggccagtggcaaggtgatctcggccctggccgagcagctgcccgagctgtggggcggctccgccgacctcgccggctcgaacaacaccacgatcgagggtgccgagagcttcctgcccgccgaccgcgccaccgatgagtggcccggcaacccctacggacgcgtgctgcacttcggcatccgtgagcatgcgatgggtggtgccctcaacggcatcaacctgtcgggcctcacccgtgccttcggtggcaccttcttcgtgttcgccgactacatgcgtcccccggtacgcctggcggccctcatgggcgcgccctcggtgttcgtgtggacgcacgactcggtcggcgtcggcgaggacggccccacccaccagccggtggagcacctggccagctaccgcgccattccgggcctggacatcgtgcgcccggccgatgccaacgagacggccgccgcgtgggtcgagatcctgtcgcaccacgatcgtccggccggcatcgtgctgacgcgccagaatgtgcgcaccgtcgaccgcacctcgggtgagttcgcctccaccgacggcgtcgccaagggtgcctatgtgctgcgcgaggcccgcaacggcaagcccgaggtgatcctgatcgccaccggttccgaggtggagccggcactggacgcccaggacatcctggagacccagggcattgccacccgcgtggtgtcgatgccgtgccaggaatggttcgacgcccagcccgcggagtaccgcgaagaggtgctgccctcccgcctcgacgcccgtgtgagcgtcgaggcggggctgtcgctcggctggtcgaagtacgtcggcttcaagggcgcctcggtgagcctggagcactacggtgcttcggccaagggctcgctgctcatggaggagttcggcttcaccggcgagcacgtggccgaggtcgccaagggcgtgctcggtaagtgacgcccggcaggtagtcacgcattacccggcctgacccccggcaacgcgcttgtcctgaaaatcttacggactgcgccgcgttgccgggggtcacgcctatgtctgggctcggccggctgtcgatgtcccggcgggggggacggtcgttgggtggataggggatctgcccggcccaccctccgacgaggcacttgtcctgaaaatcttacggactgcgtcgcctcgccggagggtgggccttcgcatgttcgtgtctggggtccgggcctcctcgcgtgacctcagcgacccgtgaagtagatgtccttgtgcagggcgcagagcgggttgaactcgtggccgcacactgggcaggcgccctgtgagtactgctcatggctcagggccgtattgcaggcgcagcacagcgtcggcaccggctcgtcgggtccggtggccacgaaccggtggtgctccagcgcatcgtggcactggtaacaggcgtagtagcggccacattgcgcgcatttcagcgcgaccacatccgaggcctggtggtagtgcgtgcagcgtccctcggcgtccaggccgatgccgtggaaggcaatggacatgtgcacctcctgcatgtcgggtgccgcgtgccggcaggcgtcccctcccgaagtctaggagcccgcagtccgaagcccgtggacgccccgggggccgccgatgccccgcgatggcagcccccgggggatgtcacaggcgccgtttaggatgaaggcaccccccatcaaggacggccatggatcagtttccgcaaggcttcatcggcgtgcacgacgcccagcagaacaacctgaggcatgtcagcgtcaccatccccaagtaccgggtgactgccttcgtggggctgtcgggctcgggcaagtcgtcgctggtgttcgacacgatcgccgcgtcgtcacggcgggagctcaacgagaccttccccagcttcacccagcagtacctgccgaagttcggccagccccatgtgggcgccatcgaccaccttccggtggcgatcgtcatcgagcagcaacgcatgcacacctcggtgcgctccacgctggccacctacaccggcatctactcgctgttgcggctgctgttcagccgcgccggcaagcccttcgtcggctactccgacaccttctcgttcaacctgccgcaaggtatgtgcccgcgctgccagggcctgggatatgtcgacgacatcgacgagtcgaagctcatcgatcccgacaagtcactcaaccagggcgccatcaccttcgtcagcttcggccccaacacctggcggtggaagcgctacgccaacagcggcttgttcgacaacgacaagccggtgcgcgactacacgcccgacgaatacgacaccctgatgaatgcgccgcgccaccgcctcaccgatgccccggcggcctggccgaagtcggcgctctacgagggggtgatcccgcgcatccgtcgctcgatcatcggcaagaaggaggcggcgcaccacctcgaggccctggccgccatcgtcacgcgtcggccctgcccggcctgcgggggcacgcggctgcgtcccggtgcgctcaccagccggatcaaccagctcaacatcgccgatgtgtcgcggatggacctggtgcacgcccgcgacttcctcgattcggtcaccgagccgctggtggccgaggtggtgcgccagctgcacaccaaggtgcaatcgctcatcgacatcggcctgggctatctgacgctcgaccgcatcaccagcaccctgtcgggcggcgagacccaacgcatcaagatcgccaagttcctcaccagcgagctcgtcgacctggtgtacatcctcgacgagcccagcgtcggcctgcacccgcacgacatcgccctgatcaacaaggcgctgcgcaagctgaaggcgcgcggcaacaccgtgctgatcgtggagcacaatcccgaggtgatcgcgatggccgaccacgtgatcgagatcggccccggggccggcagtgccggtggcaccgtcaccttcaccggcagctacggcgagctgatggcgtccgacaccctcaccgctcgcatgctgcaccagcccctgcgctaccgcgcgccgcggccggccaccgggagcctggcgctgcgccatgtgggcctgcacaacctgcacgacgtctcggtggacgtgccgctgggcgtcgagacggtgatctcgggtgtggccggggccggcaagagctcgctgatcgaggccctgcgcgagcagctgcacggcgactacgtcgacctgcgccagagcgccatcaccgtgaacatccgttcgacgccggccacctacctcgaggtgctcgacgtgatccgcaagctgttcgcggcggcgaaccacgtggccacgtcgtggttcagctacaacgggcggggcgcctgcccacgctgcaagggcaagggcgtcaccatcaccaacatggccttcatggatccggtggtgcaggaatgcgagcagtgccacggccagcgctacaacgaccgggcgctgggctacctgtaccgcggcaagaacatcgccgaggtgctcaccatggccatcaacgacgccctggagttcttcgcgccggtgcccgaggtgcacgccaagctcgacaatgtggcgcgggtgggcctgggctatctgacgctcggccagtcgatgaccaccctgtcaggcggcgaactgcaacgcctcaagctcgccggcgaactcaaccgggtgggcagcatctacctgctcgacgagccgaccgccgggctgcacctcagcgacgtcgccgggctcatcaccctgttcgacgagctggtcgcccagggcaacacactgatcctggtggaacacaacctgcaggtgatcagccaggccgaccggctcatcgacgtgggccccggcgccggcgtctacggcggccacatcctgtattccggcacgcccgagggttcgctcggtgtgtccgaatcggtgaccgggcaggcgctcgccaactatgacagcgtcgtgcgggccggcagcggcccgacgcagtgacaggggcggatggggcaccgtggacggtgccccatccgcccctgtggacgtcgtgggcgatcgggcctcagcccaacgagatcacctggctgagcacatgcttctcgccggcctcgaggtagacctcgtcggccagcgcattggcggtctcgacgcagaccatctgctgccattcgcccggcgccatgccgaagtccttctcgctgcgcttgctccacgggttccacaccacggtgctctccgagccgctcttctcgatgcggatcgtgcggttgagcaccgggtcgacgatcgaggcgctggccaccgactggtagacgcggtcggtctcgccgctgaaggtcaccggcccctcctgcagctggccgtcgcgtccgctcaccttgtccaggtagcgcgcagcgtccaggcccttgacgctggcccgggtgacatcgcccacatggaagtagttgtgcatcgcgtcctcgaaatggcatgcggcgctgccggcgcgcaccaccagcgacatctggacggccacgcccatggtcaccaccagcgtcacctcggcgtccggcgcgaacttcgacttcgccagcgtctcgtcgtcgaggcgcaggcgcaccgtcacctcgccaccgggcgtcgaggaggcgtcgacgagcttccaatcggccagtcgcgccaggccgtgggccggcttctgattgtgtgagcggccatcggcgaaccacgggaacgagatcggaaccccgccacgaatcgccttgtcagaggccaattgggcctgggcactctgccagaacaccggctcgctggcgccacgcggctgccaggcggtcacctgggcgccatgcaggtggatgcgtccggtgcacaggcgcgtcgacacgtcgatggtggcgaacccagctccggactggtcattggtggggctctcttcgttgagacgcagcccctcaggaagtgtgatgtcttgcatgtcctgagactagacgatccagcagccggcgacatccgccatgccggcttgtcgcccccgggcgtggcatcgcgcgccacgacgcgcgaggataggacgaaagggaggtgcgccatgcttgtcgaagaggatctactcatggccctggtcggggcgatcatggaagcggtcggcgagcgcgtggtcggcatctacctgggcggcgggctggccgacaccgacttcagccccagccaggccaccgtcaacctgctcgtggtcaccgacgtcgatcccgaccgcgcgatgctcgacaccgtgcgcgacatccacgccggcgtggaggacgagttcagtggctggggcgaccgcatcgacatcgaatatgtcgggctgcccggcctggcgggattccgcaccggccagcacgtcggactgcgttcggaggccggcgagaccctgcacctggaaccgctcaccgagctgaacgtgctgagttgggaatcgatccgggaacgctcggtcgacctggtgggtgaccccgccgacaccgtgctgcccgagttctcccgcgacgagttcctgcgcgcggtgcgccagcatgcggcgggttggccacagtggacgcgcagccacacccgcatggaccagcaggtgtacgccgtgctcaccatgtgccgtgcctggtactcggcccggttgctgcgccaggcgtccaagcgcgaggccgccctgttcaccgccgccgagttcccgcgctgggagccgctcatcacctgggccgacgagtggtggtacgccgtggaggaaccgaccccgcgcggcccggccgaacgcacgctcatcgaacgcgtgcaggaccttgtcgacgagctgagcgagcgggtgctgatggccggcacgcccgcgcagggcggcggcatcgagccccctcgcccacccgtggacgccccggacgcccgtggctgaggcatccctgcgcccgccccgctccccgctgctgcccgcggtgctcgtgctggtggtgctggtggcgatcgccgccgtgctgcccggcatgcgcgcccgggtgcgcgaggagatcccgcgtgacgatgtcgccgccagccaggacttcatcgactgggccgtcggcaacaccctgaagcgttccggggcggtcggcgtcaccgcgttgcgcctgacggacttcgccctggaggtcaccgtgcgcactggcgacggtgccgagcagcgctggcgggcgctgccgcagagacccgtcgagttggttgccaaccagccactgacgcccaccaatggcgtggtctccggcgacggctttaccccgagcgcgctcatggcggcctggaccgacctgcgtggccaggacgaccagtgcgaggcctccgacgcccaggtcgacgccacggtcagctggggtggcgccatccggtacacatcacggtgcaactcacccgaggcgcaggccagcaccaacctgatcaagggcttcagctcgccgaaccgcatcggcgtggccaatgtctacgagctcgattcgttcgccgccggcacctccctggagatcgtgctgcggcagttgcgccagctcgctcccggcgggcaggtgggccagctcaccgtgctggccgacgccgggaccgccacggcggggctgggcatcaccggtggcagctgcggcgtcgaggcgctctggcgccaggccgagcccgatggcgccagcacgtggctgcgccagtcgcggctgtgcagcgccgtcgacggcaccatgctgcccaccaccacactcgatgcgccggccgatgccgcgcagctggaggcccaccgcttcgacatcaacgcggtggatgtcgcctccctcgtcgggcacctgcagaccaccggcctgcccgcgcaacagggctcggccagcgtcgtgcaggtcgcatggtccgacagattcaacgaggtggtggccagggtgtccagcggaacgggctcggacgcccgcaccggctggtattcgttgaccggtgagcagctggcgatggacgccggctgattactggatctcgtcagtgtacgccgtgtaccaggtgaccgggtcaccggacgcgcggaacagcacctggtggaagccgttgtcgagggtgccgcgctgaccgcccagcacgatgaagctcacctggccgaggtccagctcgggggcgtccgcagccggtgccagcttgagcggcttcttcaactgcgcgcccggctgcatggcgtcggaggaagcagccagggccggcatcgtgctggcccgcaccggcgtctcgcgcaccgggaagccaccctcgatcgcgatggtgttcgccaccggatgcgccggctggtcggagcaggcctccccggcacggatcagccggtcgacggtgatcttcgcgtccgagatcgtcaacgtcttggtcacattgccgcactgcttgtcgtcggtcaccggctggtgcagctgcactgccgtgtgctgcgcgtcgtcccacagccacacataggcgtagtgccagtagctcgacccgttgcccacggtgatccatgccacggcgtcggcgaatccgtcgccattcaggtcgccgaactgcgtggcattgccggcattggcctcatcgaccttggcccatgacttgtcgctggcctcggggctggccgacgcgccattgcgcacggtggcattgccgttcgcgtcgtaccagtcggcgtggacgaaatcgaagccacggatcgcctgtgccccggtggccgatgacgaggcgctggaggcgggcgaggtgggtccgtcacccgtctcggtatgacgcgccgagggcggctgcgcgcacgcggccagagccagcacggacagggcggcgatcacggggcgggcacgcaggcgaaacgtcatggccatgagcctagggcccggcgcgtccccggccggtgatacccgccgggagcgcccggacccgccgctgctgcgccctgcgcggatgctggttgttcaccctcgccgcgtgcacggtgatgtggaatgcttgaaggaggactggaatgcttgggggaggacagggggcaccatgggcgagggcctgcgcatcggcttcgtgtcgctccatacgtcccccattgcctctccgggatcggcggacgccggtggcatgaacgtcgtggagctcaatgccgccctggcgctggccgccgccggccaccaggtcgacctgatcacccgccgcgaccatcccggcgaaccggccgtcgagcagctggccgagggcgtgcgactgctcaacctggacgccggtccgccgcacccgatggccaagagcgcgtcggaggagctcatcgagccgttccgtgccgccatggcccgcctgcccggaaactatgacgtgatccattcccaccactggttcagcggggtggccgcactgccactcgcccgccagtggcgactgccccatgtgcagagcttccattcggtggccgcgcccagcggatccaccagcctggccgacggcgagcccaccgagtcacccggccgcgtcgccggcgaggccctctcagcgcgcgagtccgacctggtgatcgccgtgagccacgccgagcgtcgggccgtcgagctgcgataccaccgcttcgacggcatcgacgtggtgcatcccggcgtcgataccgagcagttccatccactgcgcgccggccaacgccactgggcctgggacgacaccggcggatgctatttcctgttcgccgcccgcctgcaaccgctcaagggccccgacctcgccatccggatgatggccgagatccccgaatacgatcgtccgcaattgatcgtggccggcgaggcatcggccgacttcgccgactacgaagcgtcgttgcatgcgctggtgggcgagctgggcctcaccgacaaggtgacattcctgggctcgcagagccgcgacgagctggccagcatgttgcgcggcgcctgcgcgctgatcaacccgagctactcggagaccttcggcatcatctgcttggaggccgaggccagcggcgtgccgccgatcgccgcccgcaccggcggcatccccgaggccgtgctcgacgggaagaccggcatcctgcttgacgaccgcgaccccgcgagctgggcagcggccgcccaatcggtgcgcaacgacggcgtcctgcgccagcgcctcaccagcgctgcccgcgagttcgcctgccaacacacctggactgtgatggcacagggcctggaagacagctatcgacgagtcatcgccgcattcaatgaggggaacagggcatgagcactgctgcagagatcatcgaccagatcatgaaccagccggccgggctgtcgctcctggtggtgcatgcccatccggacgacgagaccctggagacgggtccgctgatcgccgggctcaccgactcgggcgcccgggttgacctgctcacctgcacccgcggcgagcgtggcgaggtggtgcccggggtgctgcccgccggcatcacccaggaccagctggtggtgcagcgtgaacgcgagctcgaggccgcctgcgacctgctcggggtgcgcaagcagtacttcctgggcgaggcgccgttccgggcgccggcccagcagggacgccactacctcgattccggcatggtgtgggtcacgcccacccaggccggccccgcgcccgacgcgagcccgatctcgctgacgaagtcgccgaagaaggaggagatcgaggacctcatcaccggcctgcgccagcgcgaatggtcggccgtggtgagctacgacgacgccggcagctacggccaccccgatcacctgcgcacccaccaggtggtcagcgcggcagccaagaacgtcggtatcccgtgcatccagatcctctccgaccccaccgccgacgtgcccggggcggcatggttcgcccccgatgacgtgcggtcgcgcgacgtggtggtcgaggccctgcgcgcctaccgcacccagctgcaggtgctcggcaccaccgccgacggcaccgagagcgccgatgagaagaacgacctgcacatccgccacgtgggcggccagcgccaggagatccccacccgggtgggcctcatcgcaagctgaacgcttccggtcgggcgacgacaattccggtcgggcaacgccgggacgcgtgattatcgcgtcgttgggctgattgacgccgattgctggcgggtggccgcccgtgctgctgcgtgacgaaggtcgataacgttgtattcggatggagcgtccatccgtctggagttgtcatgactgatcaatcacacctgtccggttgggacgtcttccgtctcaatgcacccgacctcacccggcgggccatcaccacggtgcgcgccagcttcgcgctgctgggcgtgctggccctgggcctgggcatcgccctgctcgcatggcccggcaagacgatcaccgcgctcgcggtgatcctgggcgcctacctgctggtcgagggcgtgatccgcatcgtgatggcgctggtgaccccgctgatccacgccgggtcgcgcctgctgtcgatcctgttcggggtgctgttcatcctcggcggcgtcgtgatgatgcgcaatcccgggttgtccggcgagacgctgctggtggtggtggcgatcatcattggtgtcgcctggatcatggagggcgtgctcgcgctgctggaatcgggcagtgcccagtcacggggctgggccatcgccttcggcatcatctcgctgctggccggcatcatcgtgctggtgacgcccgcctggtcggccgtgatgctcatggtgttcaccggcgcctcgatggtggtgatgggcatcgtcgcgctggtgcgtgccttcaccttcggtcgggaggtgctgcgcgcccagcactgaggcggcgcgacgtcgtcacatgcagatgggggcgggtcgggcaccgatatcggtacccagcccgcccccatcccgcgccagattgcggaatgtcgtcgcgacaggcgcccggtggacctcagaacaggccctcctggcccttcgggggtgcatagaccggatcgatgccctcgaacatcttgctcaccgacttgccgttgtggatgcgatcgatggcctcggcgaacagcggggccactgacagcacgtgcaattcgggccagtgctcggccggctccggcacggtatcggtggacacgatctcggtgatgaacttctcgcccgacagcttctccagcgcattgccggcgaacagtccgtgcgtgcaggtgaccgatgcgtccaccgcaccctggtccttcaacttgcgcaccagctcaaggatcgacccgccggtggcgatctcgtcgtccattacgatgcagtgcttgcccaccacatcgcccacgatggtgtcgatcaccaccctgttgtcgcccaggcgtcgcttgctgccggcggccaccggcacgcccagcaggcgggcgaaggtggacgcgctcttcgcgttgccgaagtcggggctgaccaccacggagttctcgcagtgctcctggaagtagcgggccagcacgcccatggcggtgagctggtcgacgggcaccgagaagaagctctgcacctgcggcgcatgcaactgcatggtgagcacgcggtcgacgccggcggtgctcagcatgtcggccaccaggcggccgccgacgctgatgcgcgaggcgtccttcttgtcggagcgcgcatacgaatagtgcggtatcaccgcggtgatctggtcggccgaggcaccccgggcggcctggaccatgagcagcagctccatgaggtggtcctgggtgggcggcaccagcggctgcacgatgtacacatcgcgctggcgcacattggtcagcagctgcgcctggaggcagtcgttgctgaaccgggagatgttcacaggagacagtcgcacccccaggtgctggcagacctgttcggcaaatggctcatgggctgagccggagaacacgatgatgtccttcactgccatcctttcggcaaggccggatactcagcagactagcgggtcggccaaccccacgagcccgatcccgtccaggggccggctcacgccagctggtcgagccaggcgtccaccagtccgggtgccacgcgggccgtggcgacgccgtcggtgcgcgcccggtcacgcagcgcatgcggggcgatgcccgccgcgttgagctcgtcgtcgtaggcgatcagccagcgctcgatctgtgccggatcggcctcgggatggaactgcaggcccagcaggttgggtcccagccggaatgcctggtggtcgcacgtgggggtggacgccaacagctcggcgccgtccggcaggccgaagcgatcgccgtgccagtgcagcaccggggcgctgccgagcaccgacagcggcgaatcggcaccctcgcgggtcagcgtgagcggtgcatagccgatctccttgacccccatgggctcgacgctggcgcccagcgccgcggccatcaactgcgcacccaggcagatgccgagcgtcgggcgtcgggcctgcacccgcctggtgagggcctccagctcggtggccatccacgggaactcggcgtcgggacgggcccccagcggcccacccagcacgacggccaggtcggcgtcgaccaggggctcgggggcgtcgacgccagcctgcaacacctgcagcccatagccgcgtgcgcgcaggcgtggcgcgaacagcccgaggtcctcgaaggcgacatgctgcagtacgacggcggttggcatggcctcatgcaatcacggggatcgcctagccggtggccggttcggtgcgtgacccccgtgcggcggacgccggcatgcggcgcagtgaacccgaggcggcccacagtcccagcgacgcggccatggccaccatggccagcaggctgatgccccagaagcccggcagggccgcgagcaggggcccgccgatgatccccgcgatggtggagcccaggtacatgaacatattggccaacgccgacaccgtgccgcgcgccgtggtggtcaacgactgcaacaggcccatgaacaccgggaagatcgtgccgcccaggaagaaggtgcccgacaggatcgcggcggcggccacgatgcccgcgctgaagggcagcgcgaggtaacccaccagatagcaggccatggccaccgccagggtgcgtccctgcccgacgcgacgcacgatgcgcggccccacgacggcacccagggtgttgccggcgcccaatacgatcatggccacgccgatccccgacacgctcagcccgaagccacgggcgaaccaggtggccgcgaaggacaacaccgcaaagttgcccaactggaacaccaggtaggcggcaaaccgggtgggcgcatggggcgtgcgcaacaggcccgcgtactgggcgatgatgccgccggagtgaccggtcgggggcaccgaggggaaccagatccccagcgcgatcgccaccagggccgccaccgcccccaccacgaagaagggcgtcgaggtggacacggccgccaggaagctgccgaccggcacgccggccagttgggcgatcgtcaggccggcggtgggggcggccatcgtcgcgacgaccctgctgggggccacgagctgggggatccccgcccagatctgcgggctgcccaccgccgcggccaccccggtggcgaagcgcagcgcgagcatggccgggaacgaccaggccagcccgcaggcgaaggtggccacgcagaaggcgatggtgcccgcgaacaacacattgcgccggttgaagcgatcggagatcggcccggagaacaccgcggtgaggcaatagccgatggcataggccgagaccatccatccggcgatgcgcggtgagttcccgaagcggcgcgtcagatcgggcagcagcggtgccaccaggaaggtgtcggtggccaccaggaacatcaccgcaaaggacaggactggaatgcgtttcacagcggtaacgcaaacgttgacatcagtgtgaaggtcaagtcggcgtccggagcccatccacggattcgggacggggcatcgatgggggagtggcatgcgcatcggggaattcgccgaggtggcggggttgagcacccgccaggtgcgttactacaccgacatggggctgctcgcggcccggcggctgtccaatggctaccgcgactacgacgcgggtgacgtggcgcgcgcccgacgcgtccatgccctgttcgcgatcgggctcaccagtgagcagctcaagcggctgtcgccctgccttgccgacgaggcgacgaccttctgcgacgccacccggcaggcactggtgcgccagctctcgcagatcgacgagcgcatagggcacctgcaggaggcacgcgaggccgtggcgcgccagcttgagacggccgatttgtgagcccgcgtcgaactagcgtcggggaggtcgggtaccgggggtccctgggctgggatgtgcgacgagtgggtggaggaatgccatggctgatgagccgcaacatctgaagatcgacctgcacccggtgttggtgcaggcggacggtgaggttgccgtgcgtgagggcgacgaggtgacgccggtggcggcggacttcgccgagctggcccgcgagtccgacccggtgggtcgcgcgcagggactgttgatgctgccgatcgtggtgggcctgcagaagggcacgaagccggtgaagtcgatgctggtggaggtcacccgcgacggggtgctcaacgagcccgaggaccgcaatgcctacgccaccgccatccggcagggctcggcctatgagggcagctatcgccacgatgtgacgctcacccgggtgggtgtcgtggtgggcgagatgaaccagaagctgcccgacaccctgtgggtgccgttgttcgtgctgaaggagtcggacggtcggctggtgccactggacgcgaagtacttcaatgccgtgcagcgccgcaaccatggtgggcaggagcccgggacgcagggtgccccgcaggcgagcgccgacgaggaatccggccccgacaaggggtgatggcgtccagcgctgctggctgcggcggacctgcccgcaacgttggccccggcccgggcgacgggcttcgtcagaacaggtgcttgttcatccggtagttcttcacctgcacgccgtggatgatcgggtgctgctcggccacctccacgaagccgtggtgggcgaagaagggacgcgccgtgatgctcacattcgagtacaacaggggtgccttggcgatgcgcgcccggttctcggcctcccgcaggagcgccgagccgatgccacgacgcacgaacttgggcgagacgaacaacatgtcgatgtagccggtctcgcggatgtcggtgaagcccatcaccacgccggccaccacggccaccagggtgcccgattcctgccggtcgcggttccactcgtcaagcgggcggtcctggggcgaggcccaggcgtcgatctgctgcttcgtgtagtcctcggcagcggtgagcgtgaccgattgcaggaagatcgaccgcgtgatgccggcgtcggagtccatgtaggggcgaacccgcacgtgtccgggagcagatgccattcggccattattgcccgcgcgtccgaacgtgcggctgaagaatgaggggagccacataacctgcccgaccctaccgactggggcggctcggatcgaatgcgtgctggggcgcggggcgcgggtagggcggcgtccggcatgggaatccgttgtgatggttcagccgagggtttactattgcgtccgtgatgattcatgagacgcgcgaacaggctctggcgcgggtgggccatgccctggccgatcccacgcggtgccgcctgctgttggctatcgtcgacggcgtggtctatccggcgcagatggccgagcacctggagctgtcgcgtgccaatgtgtcgaaccacctggcttgcctgcgcgattgcggcctggtgagtgccacctatgaggggcgccgggtgcgctatgccattgccgacgcgcacctgtcggcggccctggtgcagctcgcgcaggtggcgctcgatgtgacacccaccgattcctgcctcaatgaggccgaccagccgatcgaattggaggcccgggcatgagctccgcaacgcagtgctgcgaccacgacgcgcccgccggcgcggaccaccacgacgagctcgcctggtggcgcgaccgtgaggtgatcttcccgatcggctccggcgtgctgctggccgcgggcttcgtcagcgcgttggcccaggccaatacggcctcgctggtgctctactgggccggcctgctgctcggcgcgtcgaccttcgtgcccggtgccctgcgggccctgctgaagggacgcctgggcatcagcctgttgatgatgatcagcgccatcggtgcggtcatcctgggtgcggtggccgaggccgccgccctggccttcctgtattccatttccgaggcgcttgaggacaaggccatggaccgggcccgcagcggcctgcgcgccctgctcgagctcaccccgaagacggccaccgtgctggtggacggcaagccgaccgacgtcgaggcgtcgcagctgcaggtcggtgacctcctgctggtgcgccccggcgagcgcgtcgccaccgacggcgtcgtgcgggacggcgccagctcgctggacacctcggccatcaccggggagtcgattccggtgcaggtgggctcgcgcgacgcggtctccgccgggtgcatcaacatctcgggtccgttgcaggtgagcgccaccgcgcccggaagcgacaattcgctcaccacgatcgtcaccctggtcgagcaggcgcaggcgaagaagggccgtcgcgcccgcctcgccgaccgcatcgccgcacccctggtgcccggcgtgctcatcctggccgtggcggtgggcgtgctcggctcgttgctgggcagtcctgaggtgtggatcggccgcgccctggtggtgctcgtggccgcctcgccgtgtgccctggccatcgccgtgcccgtgacggtggtctccgccatcggcgccgccagcaggttcggcctggtgatcaagagtggcgccgccttcgaggagttcggggccgtgcgccatgtcgccttcgacaagaccggcaccctcacccagggcagcccctgcgtggggcgcgtgctcacagcgtccacagtggacggtgggtccatcgaggacagcgtgcgcacgagtgacacagcgtccacaacaggcacggcgtccacaacaggcacagcgtccaccgcggacgcccgtcccgccggcgtcagcgagcagcaggtggtcgacgccgccgcagcgttggaacgcggcagcaaccacccgctggccaccgccatcgtcgccgccgcgacgaatgcgcccggcgccaccgacgtgaccgagctccccggtcggggcatccggggccgcgtgcagggccacgagatcaccgtcggcagtccccgctggctggcgcccggcgcgctggccgccggcgtcgagcagcttgagaccgacggcatgacggtggtgctcgtgcaccgcgacggacagccgctcggggccatcggcatccgcgacgagctgcgcccggaggccgccgagaccatccgcgcactgggcgagcagcgcatcggcgtcaccatgctcaccggcgacaacgaacgcaccgcggcggcactggcgcgtcaggccggcatcgacgatgtgcgcgccgggctgcgtcccgaacagaaggcgagcgcggtcaacgagctgtcccgccgcacgcccaccgccatgatcggcgacggcatcaacgacgcgccggccctgtcggcggccagcctcggcatcgcgatgggtgcacgcggcggacaaggaagcgccggcggatccgacgtcgccatcgaatcggccgacgtcgccttcaccggcagtgacctgcggctgctgcccggggccttcgccttcacccggcgcgggcggcgcatcatgaaccagaacatcgccctgtccctgctgatcattgccaccctgttgccgctggccatcaccggggtgctcggcctggccaccgtggtgctgatccatgagggcgccgaggtgatcgtgatcgccaacggcatccgggcggcgcgcgtggcacgggcccgcggcggggccccggcagcccagggccccgtgccccctagtgtggaggggcccgcggcgccacggatggtggcgcattctgcctgatgagtcacgccacaggtggcgcgcatacggcctgacgaatggagatccacgatgagcgtaagcacccccggcaccggcctggaggtcttctcggtggtggtcgacactgacggaagcatcgctcagatggaggacgacgaccagtaccacacgatcgcccccgatttcgcggtgctgttcgacgacctcgaccagcagttcacccagcgcggcgtcaccaagatccccgtggtcaccggtttcggcgacggcatggccgcaccgcgaccgcgtcccatcatggtggccaccaccggcgcgctggtgtcgcccgatgaccccgatgcgttcatggatgccttcggggccaacgaggcatacgacggcgaataccacgacgtcacgctggcgcaggtgggcacgctggtcaatgacctgaacctcgcggaggcctcccacgcccccgaccagagggtgcactgggtgcccggattcatcctcatcacccctgaccgcaagctggttgacctcgcctacgcactgcacaagggctggatcaaataggcgtcggcgcaggctgtgcaccggggggatgctggcgctgtgggagcgtccaattaatgtggacccatgcgcgggctggagccaacggtcccgatgggcaatcgaatggagaagcacggtgagtcgcagcacagggccgaagggcccccagcgtggcaaggcgccccggcaggtccagggttaccgggtgtcggtcaaccccgacggaaccctgttgacgaaccgtcccgacggcgagctcgaagaggtggccaaggactttcgtgagctgacggcacgactcagcctgcgcggtgagcagcagggcctgctcatcctgccggtggtcaccgagttctcgaagctgatgcagcgtccctcgctgtggcccgtggtgctgggtgccggcggccgcctgcgacgccccaccgggcgccagagcttcatcaatgcgatccagaccggctcgccctatgagggcgagttcgtcgacacgacgctggtggaggtgggcaaggacgtcaccgagatgagcgcctcgaatcccatgctgcagtgggtgccggtgttcctgatcctcacccccgacggccagctggccgatctcggcgagacgatcatggaggggcgtcgcatgttgtacccgcaggaggcggccaacaccgcccccgacgcgcccgacgagcccggtgcgcctgacgcatcgcgcgagcccggcgcagccgaggagccctctgcgggctgacgcagggcggccttggtcgcggtgccatgatggccacaagcgagaggaagcactgatgtctgacgaactgatgggcggcgacctgctggccgacgatctgggggccccggtgcggatttcccgccccgtggagcgcgtcgtgagcctggtgccctcgctcaccgaggcgcttgccgagagcgcccgcgaactcatctatggggccaccgacttctgcgtgcgtccggagaacctcgacgaggtggccggccatccggtcacgcgcgtgcgcggccccaagaatcccgatcgcacggtgatcgagcagctgcaccccgacctcgtggtggccaaccaggaggagaaccgggcgttcgacgtggagcacttgagggtcgatggcgtgcccgtctgggttaccagcatcgacaccgtggacagcgcgatcaccagcctgacaaggctcttcaccgaagcgttgggcagggaacggcccgattggctgacccgtgccgagcagaactgggccgagcccgatcccaccgtcaccgccagcgcggtggtctgcatctggcgtgacccgtggatggtcgtgggccccaacacctatgtggccgatgtgctgcatcgcagcggcgtcgacctggccccgctgccggtggacgactggaagaacgcccgctatcccaaggtggacctgtacgccctgcaggccagcggcgccgaccgcgtgctgctcatggaccagccctatgcgttcagccccaccgacgggcccgaggcgttcgagggcatggacgtgcgcatcatgcccgagcgtccgatggcctggtacggcccgggcatgaccgacgcgcgcgccgaggtgcgcaagctgatcttctgaggcctgcgacgccggactggtgtcgcgcgaccgatgtcgtggggccgatgtctggggccgatctggtgcggctcagccggcgagcgggtggtggcgtccggagaagccggcgcgcacccaccagtcgtgaccgaaggatccggcatatccgatggcggcggcggtcacggaccacatcaggtattcgatgtcggagcgacgatcgccgatcatcacgtcgatggccacggccaggcccagcatcaggacggtgatcgttacccacttgtagacgagcctgcgtcgactgtgcatcatgattcctccttcggaaccgatgcggccgcggccttgcgggccgggtgacaaccgctgtgttgtcagttcaattctcccacctgcgcgtcgccagtcaatggttcttgagggtggaaatgcacgcatgcacgctgccgggccggtgtcagcgcccgtcggggagttggtcgttgccgggtcggcagaccgccgcgtcgagcatcgccttgccgtgggacacataggcctcctcatcgaactggtcgatgagcacgcgctgggcggcgtagccgagcaccagtcccaccagcatctggcccaggccggcgacccggtcgtcggtgaggccgttgcgggtggcccacacggccagggtctcgtcgagggcatcgcgcagttggctgaactcggcacgcagctggcggccgagctcatcgtcgctcagggagcccgagcccagttgcaccagcaggtcgctcagctcgggagccacgcgcagggcgtccagggcgtagccgaacaggtcggcgggtggtgcgggacggttgaggtaggcctcgatggcggtgagtggccagcgcatcgtctggtgcgccacctccaccacgatcgcctgcttgttggggaagtggtggtagatcgagcccgccgaggttcccgacgcggtgatgatgtcggcgatggaggtgcccgccaccccacgggtgcggatcaggtcggcagtggcatcgatgatcgcctggtggctgcggacgctgcgggattgctcgggcacggccacagtctacggccgacctgggcaacccgcagggtcacacttcctatttttcggccccggcgagcattcccttcatgaaatagcgctgcaggaacagataggcgatgattactggaaccacgccgagaagcgacgctgccacggcggcgttgacgtcggaaccctggccaccgaagaatgccgcaatggatggtgccagtgtgcgcatatccgatccggtcatgatatatgaactgagtgcgaattcgttccacacgttgaccgatgtcaggatcacgacagttgccgtgaccggggcgagcaggggaaggatcacacggaagaagacctgaaggcggttcgccccatcaacccaggccgcctcttccatgccgagaggaattgagcgtatgaactgcgaatacaggaagatggcttggggtagggccaggcacaacaatggcaatatgattccgggataggtgttgagcaggtgcatgtcgttcagcatcgaatacaacggaaccaagatactcagcgggggaaccatcattactccgagcgtgaagagagtaatcccctggttgaagacggtgcgtcgccgggcgagaggataggcggccatcgcccccaggaggcacgtcagtattgtgacgacgatggtgacgatgccgctgttaagcattgcccgcaggatgtttccgtcctggacggccgcgacgaagttgtcggttgtcgccccatggaggggcagctcccacaccgatgagaggtctgagcgatccttgaaggccgtggtgactgcgaagtagaacggaagtatctggatgatgcagaagacgatcaacacaagggagatcagcacctttgctttgcggctcatactatgcctccatcttggcgcgccggcgatcgaagagagcgttgaggattatcgtgaagagggcaatcagcagaaagaggaagaggccctgggctgctgcgtagccagccgcttgatttccaaagtacgtctttccgatgagggttgacactgagttggtcgagtcgcccgggccaccgccggtgagaaccgcgatgatgtcatagagcttcagtccgccgatgaggttgatcacgcagctcgaagcgaatgaaggcaggagcaatggaatgctcacgtgccagaactgcttgaagcccaccactccatcaactgcggcagcttccttcacatcatgggggattgactggagtccagagaggtagatgatcatcgaaatacccatgaactgcaatgaattgatgatcacgatgacagcgaccgcgaagccggagtcgctcagccatgccagggggctggcgccgaacagggcaatggcgtcattggccgccccctggtggtaacggaatacgaggtagtacatcgttcccatgaccaccggcgacacgaggacggggaggtagatgatcgccctggcgacgttgcgtcccctcagattggtgtcgacgagcaccgccagcaggaggccaaggatctgctgaatgagagtacagacaaatccgtagatgaatgtatttcgcagagcgaccaggaaggttccgtcactgaagagatgggtgaagttggcgaatccgacgctggagcgcgtcgctgagtagccatcccagttcgtcgtggcgaggctgacgccattgatgaccgggtacacgataaagatggcgaacagggcgagtgccgggaggtacatcaggttgattgagatgccgcggcggcccagatgcagaccttgtctcacagccggggattcaatgcgtttcttcatcatgtctcattcttgtcgggggcgggacggggtgcgtgcccccgtcccgccgataaacctgcagagtctcagcccttttgcccgtacagggtcttgaattggtcggccatctgaccggcggcctgctctggagtcgcctgcttggtgatcacggagtcggcggaactcaccatcgtctgccacatcccgttggggaggtagacacgatcgaagaacggctttgtgggaagctccccgggcttgacgtacttgtcgtatgacggctggagggatccgaggtcagcatgcacattggtgagtcccggataggtgccaatcgactggacaagaggagtggcattgtcggggtttgcaaggaaggagaggaactccagggccttggtcttgttcttactgtccttccagactccataggcgttgacgccttcacctccgacgagatattgcccggtggtgttgttggaggggaaggggataaagccgatgttggcatccttgttgtatgacagggccgttgagagaacggtcggctgggtcatcgcaaatgccgcagttccctgtgccagggccttggccatgtcatcgagtgaggccgagacatagtcggcattgaaatcgccgtcctgtgcccactgcgcaaggcggtccatcgtcccggcctggtagaccttggcgtcgaacgtgcccgccttgaagctgtccagctgctcttgtgtgaaggcattggctgcgatctcgttggtcatatcaccggccgggccattgtcctttccggacgagacgatgggggtggcgccctgggccttgatcttgggaagggccgcgttgaagtcgtcccatgtcttcagggaatcaggatcaatcccggccttcttgaggacgtcaaagttcgtcatgatacctgtgacggtatattcgatcggcagggcgtagagcttgccgtcgctgtcacgcatggacgtgtccaatgccttatcagtgtatttggcccagtcctggtcctgaaggggctcaaggaacttgctgtagcgcagtaccgaccatccatgtgttgaccagacatcggggaggttgcccgatgccatcttcaccttcatgttgctctcaaattgtcccgagtcaatcgtgaggttgatctttgtaccgctctgcttctcaaacttctcaataagggtcttcatctccttgttctgagaggatcctgcagacatgttcatgtagacgttgagggtcgatgcggaaccacctcccgacgaccctgatgagcaggcggtgaaagccagagttgcggcgatccccagcgtgagtaacggcttcaatgagcgcttcatttttcgtctcgacttccttgtcaatagtagtttgatgaacgacttgcgagtactcaggcgatccgcgtgttaattggattgctcctcggtctcaagcaggatggcctgatccggatagatgaggggagcggcaacaccgtgaaggcgaagcattttccctgacattgcgatcccctggttgttgcttccgaaccacggcgggggaatcaatccgtcaggggggtctccaatgaggagtgggcggatcacgtaggttcgctcatcgtccagaccggggatggtgatgttgccgcgcggagagatgggtgagcgccgtgtgcaggtgagggcgtacagggcccgcctgtggtccctggctgcaatgccatgcaagcggaggctgccgtcggccaggtcccgtcgtaccaatcgccccgtcaggaggagttggcgccggctcttgtagagctccacccattgcgcgagctcggcggcttcgctgtcgtcaagggcgagcagatcccattcaaagccgaaatgcccccacaacgcggtaatcgctcggaaggacagggatgacgtccgtcctgtggtgtgggagcgggctgacgccacgtgcgtacccatcatctcgggagggaggatctgtcccgaccaccgcatgatgccctgtcgttcgtgggggtcgatgcagtcagacagccagaagcgttgggcatggagtgccatctccaggtcgatgcgccctccgcctgaggcgcagctttcgatctccaggcccgggtgggccgcgcgcagagcatccatcaggcgatacgaagcgagcatttgttcgtgcacggctgcgcggcccgcgtggtgctggtcaccagctgcgatcaggtcgcggttctcatcccacttgaagtaggagatctcatagtccgtgagcagcttgttcaacgccgcgaacacatgctcccaggcctcgggaatggacagattcagaacctgttggtgacgccattcgacgggaagtgtcttgctggctgacatgatccagtcgggatggtcgcgggcgagttgcgaatcagcgttgatcatttcgggttcgacccacaggccgaactgcatgcccagtccggtgacgtggtcgatcagggggtggagaccctggggccatacctctgggtcgggtgtccagtcaccaaggccagctgtgtcgtcgcgacgtccaagaaaccaaccgtcgtcgagcacatagcgctcgacgccgatctctgcggccctgtcggcgagccgaagaagcttgtcgaggtcatggtcgaaatagacggcctcccatacgttcagggtcaccggtcgattggcatcggggtggttcggtgtggagcgaagccagtcgtgaacccggtgggccgcctgatcgagcccattggcgtggtcgagatagatccagggggtctggtaactctccatgcggcccaatgtgatctcccccgggaggagcagttcgcctcctcccatcacctgctggccactggggcatcgctccacccatgtgcggtggtttgcggaagctgcaacgtggaggccccagacctctccgcgttcgaacgtgaagcccggttcgccacagaacgtcatcgttggggcgtcgaacccggtgcgcccgtgacgcccctcgcggagccagcagcccaggttgaggggcatgcgctgcggttcccgttcacgaccccaacggcccgagaagtccaggacttcggatgcggtcaggggagtggggacagtgagcgccagatcctcaaggtgataggcagtctcatcggtgttggtgagattcgcacgcatgcgtgccagtccgctgggcagcatctcaacagccaggtcgatccgaaggccagcgacggcatccgacatctgaaagttcacaaggccggggcccagggtgagcacatcgcccttccccccgatctcgggaggctcaacctccgtcgttgtgagccggggcgcccaactgctgccgtcatcacgatggcctgccaggccggggcgccccatccagccgctcgactcgagcggaatgacgccaacttcgaggtggctgtcgggaaggttccccccgagcggctcaagggtggccagagccatggcgtccaacgcgcttcggttgggttggcccaaatccgaaccccaatagatgatgcttggcgctgcggccttcgcggaatgcaggaccaaggacactcccccgctgcgtaggtggatgatgcgcgtctcgtcgtcgggatccacagtgcctccttcggcgtctatcaagccatgggcatggcgtctgagcgccgcacctgggaacgatctctcggcggtcgtgctccgatgcacgccaccgacttgatggtcaggactctactgcagtagctatgagttggacgtgttcgggggaaaactcccaatccctgcttgagcggtctgcttctggaacggttggcgagtgtctacgcgtgaagaatctgctcgtggatgtgcgcatcgtccggttggttgcctccccggggcggggtgcgagggggctgatggagaggcaaggcagaatggtgacgtggccagtggggaaagcatgagcgcggacgagaccaaggtgcgtgctccgacgcgggcagacgttgcccgcctggcggacgtgagcaccgctgtcgtgtcctatgtggtgaacggggggccaaggacagttgcgccaagtacccggctgagggttctcaatgcgatcaagcagttgaactatcggccgaaccccagcgcccgtgccttgaaacgcggctcaacgcacatgctggggctgctcgtcaccgaagtactcaacccatttttcgcggagtacatcgatgctctcgacgaagcggcatcgaagctcgatcgcttcttggtcctcagtgtgacgcgcgaggtgcccgatcacgaggctcaagcggtgaccagcctggtcaatcagggtgtggatgggctgatcttcttgtgtcatgtgcaggaccaacggttgtaccaggccggtggggcggggatggcgcgcgtgatgctcgatcgcaatgcgccgatggacggattcagtagcgttggtgccgacagtgaggaaggtgcggccatgggcaccgaccacctcatcgaacgcgggcatcggaatatcggtctcatcaccggtgcaatgagaagacacaataatgacatgcgctccgttggctgggcccgcgagttagcagcagccggcctgccgctgagcgagccggtggtcacgacatggacccgggagggtggttacctgggcgcgaagcagctgttcgagcgtgatgagccacccacggccatcatggccgggtccgatctcatcgccattggcgtgctgcaggccgctcacgaagctggcatggacattccgcgggacctcgcagtcgtctcctttgatgggacctcggagtcagccttctcgtggccgccgctcaccaccgtgcgtcagcccttcgaacagatggctgaagcggcgatccaggtgttgctggacggctccgaggcaccgcgccatcagagcttcccgatggagctgattgttcgtgaaagtagcggaccggcggtcccttccccgtaacccttgctcgatgtggggggcggctgtggatttcgaagattgtcagcgctctggtcgcagtgcgccagccttgtacgatgcgagcgtccacgcggtgaaatcaggcacttctaccgccttccggccaagcctctagcgggagcccctcatgcccatcggtgcaggcaccttgccgatcatgggcgaggcattcctcgtgatcgacctcatcggggtgctggccaatgcgatcctgggcggcatcaccgccaagcggctgcgcttcgacctggtgggattcaccgtgctcgcactggccaccgggctgggcggcggcatcctgcgcgacgtgctgctcggccgcggcacaccggtggcgctcaccaacccgatctatattccgctggcggccgtcggggcgctggtggccttcgttgtgcccatccgcaaggtcttccaggaacggctgttccccctgatggacgcgttggcgctgggtgcctgggcctacaccggaacgcacaagggattggccttcgggttgggccccgtgcaggcagtgctgttgggcgtcgtgtcggcaaccggcggtggcatgttgcgcgatctgttgagtcgcaagatgccggtgatcttcggtgacaacaccttgtacgccacgtcggcgctggtttcatcggttctcgtggtgattttctacaagctgggcgattcggcgtggggcgcggtgattgcgatggctgtcggcagcctgttgacgatcgtctccgcctggcgcggctggacgcttccgcgctcgatctccaatcccttcaagggcaaggacttccggagatatatccggatcaggcgccgttagccaacatggtgaaaggcctagtggtgggccgcttttctccacctttccggatctggtgaagatgtctggtcggccccttgtgtggcgcttttccatcccgggcggtgctggcgaatttccggccggacaccgtcgctgatggcgcgcggcgggcgctggccctccgggcgtgggtgtcgcgcccagtggccgttcacggggcttccccggcgcagcgcggggtcaactatgagcggggcacactgaacttcggcatggtcgccgctggtggtggatcggggtcgtgccggcaggaatttttccggtttcccaagggggtccaggtcgcacatggggcgcgatgaatggcatcgctgtggttcgccggcccgctgggtgtcattgcggtgatgacaagggcgaataccaccaatccctgaggacattcaggttttccccctcgctggctgcggtcggtgtcacgcctgaattcgtcgatgtcaatgcctgtggataactatgcggtcgtccacaatggtgcaaatctgagttgagttgcggaatgggattcatctatgtttctcacgcacgggtccccccggcccgtgccgaaagggatctctccatggtggcatttccccgcaaatcactttccgagctcacacgccgggcagtcccgtcgttgcgtgcgcgcagaagtccgcggttgatcattatcggcgtgctctgtgcctgcctcggcggacttggttgcgccgtggcctggcaccaggcaaccgacgcccgccaggtcgtggtcatggcgcgcgccgtgccgcgtggcgccaccattgacggcgccgacctgggcaccacgagcatcggttcggcgcccggcgtcgccaccatcggggccgaacagctgtcgacgttgatcggcaccaccgccctggtggaactgcagcagggcatgctggtgccggccagcgccctgggcgaggagaccgtgcgtcccgggcgccatcacgtgggggtccacctcgtggccggccgcgttcccggtgatcttgtggccggttcggccgtgatcatctcggccgcccccgggcccaccgatgacgccagcttcagggctgagcagctgagcgtgccggccaccatcgtgggcaccccgagccgtcagtccgacggctcctggaacttcgacctggacgtgccggccggtgcctccttgcggatcgcgacgctggccgcggcgggacgtctcgtcgtggtgcacgggacggcagcctgatggccatcgtcctgctcacctgcgccaccggatcacccggcgtgaccaccagtgccctggcactcaccctgtgctggccgcgcgatgtgctgctggtcgactctgatcgcgatgtctcccagaccgtgcaggcgggctggctcggcgcacggccgctggccacgcgcggcctggtcgaacttgcccaggcgcaccgcgagatgcgtccggtggccccgctgttgtgggaccgcacggtctccctgctggacgacgcgcccgccggatcggctggcgttcccgaccaggccatgggccggttcgatgctacggggcagcccatcgccgaccagcggcccggcgccccggccgtggcggagtcccgccccgtcgcccggcagttcctgcccgggttctcccatccgggatcggtcgcggtcttcgatcccgtctggcccgaagtcgccgaggccctcgccggcctggccggcagcggggtcgacgtgatcgtggatgccgggcgcgtcggccatcagggcctgccttcggcgctgttgggtgccgcggacgtggtgctgatggtggtgcggagctcactgcggtcactggccgccgcccgcctccacctgccgccccttcgtgagcggacggcagccctggcgcctgcggcgaagctggggctgctcgtggtgggcccctcgcggccctattccgatggcgacgtggaggcccaattcggcgtgccggtggttgccgacatggcctggcagcccgaggaggccgccgtgctcagcgagggtggcgacgagccgcgccgcttccgtgagcgctcattcatgcgcagtgccagtgcggcggcatcggccgtctcggcccgcgtgatcgccacaccgaattcctcccgtgacctcgcgacggggacctcccgatcgcatgacccgctgacagggagcatcggccgggcacccgtacagtccgccggcgtcaccccgggcgctcgcgatcggatggccggccccgtggacccgccgctggcaaccgggaggccccgaccatgacccaccacgcgtccgatctgccgccccttggcccgggacgagcccttccgttccttcgtccggggcaggctgcgccaccgctccacgcgggggatggggcaccgcaccctgaccggggggatggcccgtcccccggtggcctggccgacgccctgtcgctccttgaccaggtcgtcacgaccccggcgaacgtttccgcgtccgcttcaccgctcgggacgcagccggtggacctcccgcagcgtggggtcccgcaggaatccgagtcggcccccacctctgcaggagcagcccaccgcgtgcggaccccgggcacggtgcccgctgggcgtcccgtcggcacgccgatgcaggccgccgacaatcagcgtccgggtgcgggcggtgtccccggcccgtcgggccaccaaaccactgactggtccatcgtcgcccagctgcggtccacgatcagcgagctcatcaccgccgaacaggcccggtgggagcaggaacaccaccgacgcatggccgacgatgatcgccggctgatgggccgctcgctgatccggcgcgccgtgcacgactacgccgacgagctgaaccgcgccggccgggccctgtggccgatcgccctggaacagcggtacgtgaaggccgtcgaggacgccatcttcggctacggacggatgcagccgatcttcgaggtctccgaggcggagaacatcgagatccacggttacgactgcgtcttcgcccaattcggcgacgggcgccgcacccggctcgacccggtggccgactccgacgacgaactcgtggccgccgtgcgcttcctgggcgagaacgccgatccgccgcggcccttcgacgacgcccaccccaccatcaccgtggcgctgggcaacaagttccggctgcatgcggtggccttcgggctggccgatcgtccctcggtgatcatccgtcagcacctgctcaccgaggtgagcctcaagcaactggcccacggttcgatgatgcccaccgaggtggccgacctgctgcgtcgctgcgtgctggcccgcaagtcggtggtgatctccggcgaccagggtgccggcaagaccacgctgctgcgcgcgatggtgggcgcgatcccggccaccgagcgattcggcacgctggagaccgactacgagctgctcacccacctgcaatcgcgccgtcagaacatggtggccctgcaggccaagatcggcctgggcgaggtggtcgacggacgtcgcatcggcgaatacacggtcgccgacctgattcccgaggccctgcgccagaacctgtcccggttggtgatcggtgaggtacgtggcaacgaggccggcgccatgctccaggccatgcaatccggcgccggcgcgctgaccaccacccactcgcattcagcggcatccaccatcgaccggctcgcggcacgcgtggcggccggcggtgtgctgcgcctcgacgaggcctatcgccagatcgcctacaacgtgcacctgctggtgcatgtctcgctggtggacgacacctggcgcggcggggtgcgcaagcgcttcatctccgagatccgcgcactcaccggatcgatggagaatggccagcccaccacccacctcgtctacgccacctcccgtaccggtgagccgcaggtgttcgacccgggccagggcctgctcgacgatctggcccccttcgcggagcccaccggcgctccggccacccatcgtcggagcgccggcgacccggcgtcgcgggagcgtgggcgatgaacccggtcctcgtcgcgctgtgtgccgccgccgccatcttcggtgtcttcgccgtggtggaggggctggtgcgcaggccgcgtcgtcgtggcgatgtctcgggcccgggcatcccggtgctggtgcgcgcccggtggcacggcgccacccgtgcccaacagatcagctggtcactggcggtggccggcgcgctcgtcggctacctgctcacacgatcgctgctggttaccggcggcgtgcccgcgttgatcctggtgctgcccggcctgctgtcggcgcccccgaaccgtgacgtcgaggtgttggaggcctgcgatcggtgggtgcggctgctcatcggatcagtgtccaccggcaagtcggtgcccgacgcaatccgggccacccgcaaccaggtggcgccggtgctgcgggcccccgtcgacgggctgatcgccaggctcgatgcccgctggtccaccgcctcggcactgcgggcgatggccgatgacctggcccaccccgatgccgacgccatcatcgccgccctcatcgtggccacccgccgcggtggcaccggcaccggcgacgccctgcgggcactgggccagcactcccggcgtcgcctgcagtcattgcgcgagatcgccaccgagcgggcgaaaccgcgcatcgtggtgcgtcaggtgacgctcatcaccgtcgtggtgctggtcggcgtggccgtgttcaaccccgactatgtggcgccctacctcacaccgaccggccaactgctcggtgccggcctgttggccgcctacctgggctcgttggtgatgctgcgccgcatgtcgacgcccgagcagcgggagcgcatcctgcagggcgacggcgtcgagctggcccccgccgggggtgacgatgcctgacccagcgatcctggtgatcatctccggtgccgtggcaggactgggcgcattcctcgtgctcgccggctgggcacgtcgtccggtgcgcatgggcgacgcctttgccgcgctggatggcaccgtggccggccggcagggccccgaagaagacctggtgcgcgacgccgattcctcgctggagcgcctcggtgcctacgcctatgcgcgtctgcacctgcccctggggcgtcgcgcacgaggcatgctgcagctcagcgaccggtcgatcggcgatttcatggccgagaagatcgtgctgtgcctggccggcctggcgctgcccaccatcgtcacggcggtcagcgcggcgatgggctcgccgctgcgtgcccccaccctgttggtggcgctggcactgggcgcactgggctggtgctggcccgacctgtcgctgcgggccgggtcgaagcgcacccggttcgaggccgacgaggcgctgctgacgctgttcgacctcgtgatgctggaacgcatggccaatcgctccgccacccaggccctgtcggcagccgcatcggtgtccgatgtggcgatcttccggcgggtgcgtggcgtgctggcccaggcgggactcgaacagcgtccgccctgggacggcctgcggcggctggcccacgacctgcgcctacctcccctggaggacctcgccgacatcatgcagctcgacgagcagggcgcctcactgaccgaggcgctggccgcccgcgtggaggaactgcgcgacgcccacctcagtgcggggcgcatggaggcccaggaggtcagcgaacgcatgacgttgtggatggcgttgccggtgatggtcttcggcctgtcgttcatcgcgccgcccctgatgcgcctggccggtgtggcatgagggcgccccgcacggaattgacctgaaccatccccaccgatcccggcacccgccggggtcgccccccacaaggagttgatccacatggcaagcagagcactggagacactgagccgcctcaccgccctggtcgtcggattcgtcgcgatgcccacgccggcggtccgcgacgaccacggcgcccgcgacgatgaacgtggcctgtcgcagtccaccgagaacgccgtgctgctggccggcgccgtggtggttgccggcatcgtgatcgccgccgtgcgcagctatgtcgaatccaatatgcccaagtgaggcggccggccgcacccgccgggggtcgcggtcggtcgtcgtgcgacgtcggcgcgacgagcgtggcctgagcgaatcactgcaatgggccgtgctcgcgccggtgctgatgctcatcgtgctcgggctcatcgaggccggcgtgtggctgcacggacgcagcatcgtgcagcaggcggcgctcaccgccgccgagacgcaggccctgtccgggatctcctcggatgccgcagagaaggtcgttgccgacatgaccggtcaactggaggcggtgcgcacacactcccttgtgagtgacacggagatctcggtgacggtcgaggcgaccgttccgttgccactcgacgtcgggctgggtgacgtcacggtgacggccacccgcgcgaaggagcagtagggcccgggacgagtacggccgggaagcacccgggcaagcaaacagcaggaggggttgaccacaccatgaacacgctgggccggaccggccgacacgtcggcggcagggccgtgcacgaagccgcgtccccggagagctcgggacgccgcaggtgggccggcccgcgcgagtgggtaggtcggaaggcaggtcggcgggagagccggcacggcgagcggggagcggtgagcatcgaagtggtggtgatcgtgcccggaatcgtcctgttcatcgccctgatgactgccgggtggcgcatctggtcggtgcgtgcccaggtgcacgacgccgccgcggccggtgcccgggcagcgagccttgccgcaacccacgacaaggccgtccaggccgcccgatcggccatcgccgccgaccttgacgccgtgtccagccactgtgtcgaccccgaggtgcaggtcgacggttcggccttctccctggcggcgggccgctccggcgagatcggcgtcgacgtcacctgccgggtcgcgttctcggacctcgtgctggcgatgcccgggaccctggaagccaccggccatgccgtgtcgcggctggacacctacaaggagcgaaggccatgagaagagtcctgtcgagtgtcacgtccctgctcgtgctgctcgcgttggtccccggcggggccatcgccctggtgcactggggccgcggagacctgctgttcagcatcgagtggtcgggcatcctctcgcgtcccgacgacggctccctggtgttgttggccctcaccgtgctcggctgggtcgcgtgggcaatgctcaccggctcggtggtggccgaggcactgtcggcggtgagccatggccgcatctcggtgcgccttccgggatcacggctgttcggtccggccgccgccgtgctcgtcgcctccatcgccgggctgatcggcgtgcaatcggctgcgacgaactccgcgccctgtgcctcggtgtcgtccacgtcggccgcagtgtctgcggagtcagtagcgggggaggggccggcggctgcgacgcccctggccgcagcagatgcgcaggaagcaccgtcacgggattcccgtaccgactcggcagcaacaagccctcgggccgattcccagtggcaccagatcgtctccggtgacgacctgtggaccctggccgagcactactacggcgccggggaacagtggcgcgacatcgtcggggcgaacgccacgctggggctttccgccgtggacgccctgcccgtgggcgtgatgatcgagattcccggcgcgacggtgcccgacgccctgcaggacacggcggttcccgagggatcgcacgcatccgaaggggccgtcgccaactcgaccgtccagctgctcaatgaggagttcggggcgcacgccccgtctgacgaggacgatccggacggcgtggccgtcctgtccgacggcggtccggatggttcggccatcgtgacggacgacgacggtgtggacgagtcggcggagccatccctcgatgcagggtcgccggatgatccagggtcgccggaaggcgccgggttctcggatgatgctgggttgtcagatgatgccgggttgtcagatgatgctgggccagcgaccggaacggggcaggccgacgaagccggacagccggatgcgggcgggaacggggaagcggcagtgcccgctgagccacccgcgtcgccggatccatcgggtgccggccatggcggcggcgatgttgtcgtcgccccgggcgacacgctgtggcagctggctgagacccatctgggtggcggtgcgcagtggcccctgttggccgccgcgaacgcgggggaggtgccacaacccgacctgatccaccccggacagcgcctggcgctgcccgcggtggcaccggggcaggggcccgccacaacggccggttcacagccggccggcccccagcgtgccgacctccaactggttgacgggacagggaccggggctcgggccgtggtgcccggaaacgcaggcggcgacgcccacgcagcagcgccggacgaggtggcccgggccggtggcgtgggagcagatgccgacccagcggccggggagcaggaatcccgggaccatgccgtggccgacgcgagttccggcacggcacgcgcgcacgggcctgcgagcgaatccgccggcgaggggcacgacgccgcatcgcaggggtcttccggcgaggagacctccgcgcgcgaggcgtcatcagacgaggccggcgcctcggacatcgcgcgctggacgggagtggcggaatcggcgaccggtgaggaacccgctcagcaggccgcgcgcgacggagcggtgttgagcagccagcgcgatgtgcgcaatcaggtgctctcgttggtgggcccgatcggggcggcctccgccgctgccgtactgggcgtgctgggactgcggcgtcgctggcagctcaatgcgcgtccgctgggacgccgccgccacgccgtgggtgcagacagcgcccgcgccggagcggcccttgccgcggtctcggcgtcgcccgggtcggtgcggggcatgcacggcgcgcccggcgcggacgatgtggccgatgtcctcgagatctcccgccccggggcccggagctcgtcccttgatcgatcatggccggacgagccggtcggacgcctcagcactggcgaccgtggcgacccttcggtgattgatccggccactgggggccttgatggtgtcccgcaccgtggcgacatcgaggccggtggcccgggcccagacgacatgggccctgaagacatggaccctgacgacccggcccctgacgacctgggccccggtgggttgatcccgcaggacgcaggcggcggggccgtgcagctgggcgtcgccggggacgacccggtgcgcctggacctcgcatccctgggggtgctggcggtcagctcccccgacaccgaactggtgaccggcctgttcgccgccatggcggtgcagctgtcggccaaccaggccgtcgccgaagtgcatgtgccacccgactgtggctggctggaacgcctcgaagcaccgaacctgctcgtcgcggccagcgaggacgacctggcggcgcggttggcggccctggtcgcccaccgcagcggaaacctgccccccgatcgcgacgccgacgtcctgcgcctggacccggagctgcgcgacgcctggttgcccgccgtgttcttcctgcacgacccatgcaccgagagtccggaggcgctgcggcgcctgggaatcgcggtggtctgccacgacgacgcgcacgagtgcccgctcgtactgggcgaagaccgggcccgctggcggggcaccgagttcacccccgacctggtgatgccgccggcacgccgggccatcgtcgagctgctcgacgccgcggacgacaccgactacgaggaggcgtggtggtggcgcttcgacggtgacggcgacccccatgccggcccacccgccggcgcggatgtgccgctcgtcgccctacccaccgttcccgccacctcattaccggaggagtccaccgtgcttgcgccgccgatagatgcacccttcctcaagatcctggggccggttgagctggtcaacacccggggacgccagcccagccgggccgtgcgccagtgccaggaatactgcgcatggatcctgcaccatcccggatcgaacgccgtgcgcatgacacgcgacctgctcatcgccgacaccacccgacgctcgaacatgtcgcggctgcgtgcctggttgggggccgacgaggccggcgagccctatctgcccgatgcctacaccggccacatcgcgctgcatcccggcgtcagttccgactgggagcagctgcagctgctgatctcggtgggcgtcaacaaggccggcgatgaggccctggtggccgccctgtcgatggtgcgtggcgcgccactggccgacgcggcacccggcgaatggcgttgggccgaggaactgcgcaccgacatggtgtgcaccatccgcgacatcggggtcaccctgggggaacgcggcctggccgccgggaacgtcgacctcgcccggtgggctgcggcacgggcattgagcgccgccccggaggacgagatgttgctgcgcctgcggttgcgctccgagcacctggccggcaaccggttcgaggtggagcggctcgtgttgcacatcacccgccatgcacggctgttgggcgtcgacctgcaggacgagaccgtcgaactgttgcaggaggtgatggagggccaggcccgcgcacggctggcatgagccggacgcctcagaagccgaagaactccttcacgccgcccatgagcatctgcgtggccacgatgatcaggatcatgcccatcaggcgttcgatggcggtgaggaaccgctcgcccaaccagtggtgcaggtatccggcgaagaacaggatcagcgcagtgggcaaccaggcgaagccaaccgccgcgagcagcgccggcatggcgtcgggcgtctggttgatcatgatcacctcgatggcaagcaccgagggcccggccgtgtagggcaccgccagcggcacgatcagcggctcctcgaaggtgcgttcccgtagcgaggcctcgggggtggggaacatcatccgcaccgcgatgagcagcaggatcaggcccccggccgtcgcaagcgcgggctgggtgacgtgcagcacggcgagcaggccgcgtccggcaagcaggaagatcaccatgatcaccagggcgatcaacaactcgcgggcgagcaccttctggcgtcgtgacgccggcacatggcgcaacgccgtgaggaacagcgggatattgcccaacgggtccatcaccaggaacagcgtgaacgccgacgacaggatgtggcccatcagggcacctcaaccggcgagaccgcgcgggtgcccttgttgaaggtggcattgcccagcgaatgggatccgatggtgaacgccagcgcggcaagcaggtagaacacgccggcgccgatcgtcagggcggggcttaccccgtcgggggcgagcagcagcgcgccgatcacggcaccgagcacggtggcgacgttgtagaccacgtcgtagatggtgaacacccggccgcggtgcgagtcggcgatgtgggcctgcaccacggtgtccacctgcaccttcagtgactggccggccaggccgatgatgaagccgttggccaccagcgccggcgcccagaacaccgtgcccaccacggcctgcgagacgcccatcaccaccagcatcgcgatgatgcagtagcgcacgcccaggtggttggcgatcggcaccgagatcactccggacagggcgaagcccaccccgctgaccaggaaccagatgccgatgccgaagatcgccaggttgagctggtcggcattcgggaagaaatggtggcggtagatcacgatcacgaacgccatgagcaggccgtagccgagtcgcacgaccacctcggtggccatcgccaaccatgccggacggtgtgccatcaggtgacggaagccgtcgaccagcccggcgaccacctcgcgtgccgagccgtggtggtcgggggtgtcggggcccagcccggccctcgggatgcgccacaacgtggccaccgacaggcagaagaacagggcgcccaccccgaagatcagcgcattggcgccgtcaatgcccagcgggtcggcggcgaacagccggatggccccgcccgaaccaccgccgatgatcatgcccaccggcccgatcatcggcatgatcgaactggcatcgaggtattcatcgtcgtccaccgtgtaggcaagcccggccgacaggccggccagtgagaagcggttgaggctcagcatcaccagcagcaggagcatcagtgccacctggctgccggcaccggtgaggtggttggcgatcatcatcgccagcaccaccgagcagatggcccgcaccgtgtcgacgagcagtgagatgcgctgccgcgggaagcggtcgagcgccaacgagacgaacggcccgaccagcgagtaggggagcatcgtgagcgccagcacccccgccacggcccaggcgctggtggcgctctgcgggctgaacagcagataggacgccatgccgatctgcacggtgccgtcgccggtctgggagaacagcctcaccagcgtgaggcgtcggaacgcacgatggcgccacagtcggcgcagtcgttgggtgaattccacgtactccccttcgaacgattggtttgcacgggtcggcgctgagagcatccgaatcgtatcgcgctgccgccggcgcacgcggggcatcagtcggcgaggggatgcacgacatggaggagaaaagcaccaaggggctgctggtcacccccaacagccccctgggcgtctatgggtgaaggtccggggaccctcacgacggttgtgggtcggctctgctcgattcccccggcgactgctgtgtgcggggaaatgagtgctgcatcagccctcaaccttggtccgatgctacacacacatgaacagaacgtgagaattggctctcagttttggacccgctctcaggatctggcgcccggtacgcgtggcggagtctcaagaaccggttgagattcttctgaagttcttggcgtgtcgggccgctcaacccgccagatcgctcatgtgccggcgcaggcgcttcaccgacgagctgcaccggtagcgcaccatgtcctcggacatctcatgtcgtccggcggcctcgcgtcccgacaggccgtacaggtagacgctgcgcagcacctcggcactgggtgcggtgatgagtccgcgacgggccgccaggtcgatgatcaccgcggcgcgttcccggctgctgctggctggtggggtgggtggctcgggaggttgcgaacagggcacctcccgtcccgcggcacggtgcaggcgcttgcgggtgtcgagcaccaggttggtggccacagcatgggtgcgacgctcgatggggaagtcgtgcagcagctcccacagcgttgagacatagtcgcccacctcgtggcggcggtcacgggaggcctgcgcggccagtcgtggcaagagtgcctggacgagcaggcggccggcgcggcgtcccccgccctggcaggcgatcaccaggaaggcggcgacatcgtcgaggcaggccacctcgagtgcttgccggaagctgggcacctgcgccagctcggggcaggcgcagcgccatgcgtcggggaggggctggtcgcgccatccctgccactcggtgcgcagcgcgtcgaccaccgggtcggcgctggagacccgcgtgcccgcgctgatgcgggtcaggggtgcctcggtgggacgggccgcgcgtcgtgtgcccggccgggttggctgagcggcgcgctggaggatcatggctccgtcatgggtgggcgtgccccgctgttgacggacctcggccagctgaccgatggccgcggtgtgtccggtggggctggtgtgggcggcgatgccggccggacgagcgctgtcgacggcgatgtcggtgctcgaggtgcgcgctgcatgcaggggtgcggcctctgcgtcgacggggcgggtgaactgcgggtgcgtggtcatggtgacctccttgcccaacagcctcccgagcaggtgtgtgcgccggtgttgtccgagcacgcgcgggtgttgcccgcacggggtgcgtgttgcccgttcgtgtcgcgtgttggccggacggggtcggccgggggtggtggtcggcgccggaggggagcgtgccgacccggacgccgacgcggccgcggtcccggatcgggcgctaagtggtcaactgtgcggcgtcattgccgcacaactgtccacctaacggtgtccacagggcggcggatcgcagcatgtgggccgcaggatgccggggcccggcggcagggcgatatctggggggatggccgacgccgaaccgccccacctcaggcgggcgccagtcccgtctcataggcgaacagcaccaggcccacgcggtcacggcaatgcaacttcgccagcaggcgtccgatgtgggtcttcacggtgccctcggccatgaacaggttcgtggcgatctcggcgttcgtggcgcccttggccacctccaccagcacctcgcgctcgcggtcggtgagcacgtcgaggcgctcgtcgggctcgcccacgtggtcgggcagggtgggcgccacatggtcgagcagccggcgcgtcgcactgggagccaccaccgaatcaccggcggccaccgcacggatcgcgctgagcaggtcggccgggcgggtgtccttcagcaggaagccggaggcgccggccttgagtgcggcgaacacatattcgtcgaggtcaaaggtggtgagcaccagcaccttcgtgccattgtccagcgccaccacctgcttggtggcctccacgccatccatgcccggcatgcggatgtccatcagcaccacatcgggacgcagcgtggcgatctggcgcacggtatcggccccgtcgacgccctcgccgaccacctccatgtcgtcctcggcgtcgatgagcatgcggaacccgctgcggaccagctcctgatcgtccgccagaaagaccgtgatcggatcagacatgcgctctcctcgtcatcgcgtcaccttgtcgcctcacgctaccggcccgtcgtggtgcccgggcccctgaggggacgcctgatgcggcgctccgcgatcgacgcgaccttccggcgcgggatcggcgggctgcgcagccggcaccccgccgtcggccggctccccgccatcggcctgcgccggggcactggcgggctctgacgtggcgaccttcgggggcttcgcggcgatcggcaacagcgccttcacctggaacccaccggtgcgccgggcgcgggcattcagctttccgccgacggccccgacgcgctcctgcatgcccttcagcccattgccggccccgtcattgggggccttggaacccatgccgttgtcggccacctcgatgtcgatatcggccgcgccgtagttgatctgcacccggcaggtggcctgcgggccggcatgcttgaagaagttggtcaacgcctcctgcaccacccggtaggcggccagccccacggtggcgggcactgcgggctgggccccggtgacctgcaggctcacccggtcgccggcgcgttgcaccatctcggcgatgtcgcccaggccgggctgcggtgcatattcggtgccgcccggcccggcgcgcagcacgcccaccatgcggcgcatctcggtgagtgcctcgcgtccggtctcggcgatggtgtcgagggtctcggcggccgcgggcgggttcttgcgcgccagcgccttgcccccctcggcctgcacgatgatcacgctcagcgagtgggccaccacatcgtgcagctcgcgcgcgatgtcattgcgcacccgggcctcggtggcccgcgcccgctcctcgcgggtggccagctcggcctggtagcgctgctcggcggcgcgcgcccgctcctggcccgtgatgtcgttctcgcgcacccggcgtccgatgagatagggcaccagcacggccgcgaagcacatcacgaacagcagcacgagcatgcggacgcgtccggcatagccgtcgacgaagttcaccgacccgatccagcgcagcgggccgatgacggcgccgatcaggccgctgagcagcaccaggcgcgagtcgtggccgctgacccacttggccaccgaataggcgaccaccggcacggccaacagcgaggcggtgggtcccgacacggtgacgcactgcacgaggcttgccaccgacacgatcgcgagcatgagcagcggacgccgacgccgcagcaccaccggcgcggtgatcgccagcgaggtgagcacggacgccacatagtggccctggtggttggccatcaggtcgccccagaagctggtgcccaccatgagggcggcggtgagcatcacgtcccaacgcgacaccggctcgggaccctcgcggtcccagccgccgggcatcgtgggccacggcaggcgggtagaagtcatgattcaccagcctagatgcgccccgacgcggccgggagccctgcggtgggcgtgcccgcgggcggctgggtgggccctccggggaggcagcgacccacagggcaggcccccgggcgtgggcgtcccgcatggacgatgtcgcgagtggaccgtcagcgacccacagggcagccggccgttgcggcgataacggtttgcgtcgccggttcgtgccggaaagcgcccatttcacgctgctgcaccagtgcaggtctcgcgatcctaaatgaggcccctgccgcacacatcgccggggcgccgatttgtggccgggggcggttcgtatcgttttttccaccaactcaaacaccttcgatccccccctaggaggcgtatgtcgctgcacgacattcccacaaaggtccccacccaccgcgcagccgagtggcccggctacggcatggccggctgcgacgagcactacgtggaaaggctgtgccgcgacgtcgatcagcgcgtcgaccgggccgatcatcggctgttgctcatactcaagacatggttcgagtgccgcgggcagttcgatgaccagcagcgcgaccgcgtgcgcgccgccatcctcggcttccgctatgacgtcgaccatcccggcagcgacgccatgtgcacctggaccgagagccaccagatcagcttcgcggtatgcgaatacctggccggccaggagtttgtcgataacacgttcaccgacgagcggcgccgcggcggggaactgctgggccacggcgccacgcgggtggtgcgctggctcagcgatcgattccgctatggcttcagtgaatggctctcgggcgactgctacgccattgacgtggccgcgctgcccctgctgatcgactacgcccgcgacgagaaactggtgatcagggccagcatggtgctcgacctgctgctggccgatctggcgctgcaccgcttcgatggacgcttcgtggcggcgtcggccagcgccagcgccatggtgcgcatgcaccccgagcactcggcggcgcaggtgatcgtggacgccgcctatggcccggccctgccgctgatcgataccgaccagctgggcgcgatcttcgtgtgccgccaccgctacaaggtgccgctggcgttgcgtgagatcgccgccagcgatcccaccatgcgggtgctcacctcccagggcctcgacgtggacgaggttcccgaggtgttggccgccgaccccaacttcccccgcacctcacctgccgcgctggcccgcttctggtgggcgatgcaggcattcaccaaccgcgaggtggtgtcggccacccgcgccgtgcggatgagcgccaagcagtccaccaaccgcttcctggcgtcaatgacgcaactggatgcggtgccggcgtccctgcgctcgccgctgctgagggcgctgcgtccggtgaccgacgggatggcgctgcagcgcggcaatgtgcagaccttccgcactcccgcctacctgttgagcagcgcgcagagctatcaccccggcggcttcggcgaccagcaggccctgtggcaggcgtgcctgcccggcggcatcgccgtgttcggcaaccatcccgccttccgcacggtcggcgacggggttcccggtggcgcgtccaatggtcgcgcgtccgatggctgggccggcggtggctgggtgggcaacggcgtgaaccccgacatcgcccagcgcgacaacctgttgctggtgcagtacgacctgtcggggcgtcgcgggcacctggagggcaaccgcaacctgtacacgcacatccacttccccttcgtcgacttcgacgtcacccgggtggggccgacgtgggtggccggcagccgcgacggcagctatgtgggcatcgtggcgaccagcaccttggacctcgccagtgagttcgaggtggtgcagcgtggcgtgcacaccggatatgcggtggtgctgggcgacgagcgggagttccgttcgatcggggccttcgtcgaccagctcaagcaacatcgcgtggcgctgaccggcgaccggctgagcctgcggtcgctctacggcaaggcgcagctcacctggcaggaggggctgcgcgtcggcagtcggcgggtgccccacgagtacgcgcggtacaagagtcgccaggtgagtgccgagcgctttccgcaggcgatcccggtgcgtggcgacgagcacctgttgctgcttgattgggaggccggcagtcgcgaggacctgccgatcatgggctgaagccggtcatgggttgaacccgatcaggggctggatccgggttgcacgggcccccgggcgcgtggacgggtgcgtccggtggtggatcaggcgatcgggtccgctgcccggctccacagctcggcatcgcgcgcccgggcgttgcggcggtggatcagcacggcccccgcggcggtggcggcgattgcggcaatgatcagggctgcacgtctcatcggatctcctggcgttcacgggtgcgtggtggtcgggcccggccgcgtggggcgggcccgactcctcagcgtagccagcgcgggggtgggaggccggtgcgggagtagtcggccgcggcggtcagtgctggagcgggtcggatgggcggcccgtgacgccggaagcggttgcgatggcggctgagtgggcagttgtgcgggaatgacgccgcacaggtgcccacttaacggccgtgggcatggggaccagcaggataggtgcggataaagcaccgtggacggtgcttttgtcgaccccatcatccggtggcgggtcccatcatccggcggcgggtcgcggaccagaggcgtcggcaccgccccgggcgcgtcgcaacacctcgcaggcgaaccacagctcgtggcgtccctgcggggtctcgacgctgggacccaccagggtggcggcgcgctgcacccggcgtcgcacggtgtggcggtgcacgcccagctgctcggcggcacgctccaccgaaccgttctggtcgagccacacgcccagggtggccagcaggtcactgaactcggcggtggccagcggacccagcgtcgccgtggcgaaggccgacgcctgacgcggcggcaacaggtcgagcagcgacgcctgccccgcactgccctcacccaacaagccggccagcgtggcgtgcttcacctcggccaggtccccccatccgcacggcgctgagatcgagaacgacagggcccgacgccgcaggcgctccgccaggcgttggcgctgcgccggcgccagtacgatccacaaccgctcctcgacgatgccccacaccacccgcaggtcggccagcgggatctcggccagcacccgtgggtcgcccgccacgcaggccagcagcaccgggtcggccggcacctggggccatacgacgtcgtcggaatgctgcgcggccagggtgcgtccggccagcacctcggcgagcagcaggttgcgcaccccggccatggcgtcgtgatgttgctgtgacaacgccaattgcacccccaacaactgggcggcgagcaggcaggccgactgttcgatcgagtcgaggtcgcggcgtcgtccggccatgagcaggccgatgcgccggccctgcacgccgtcgatgttctgcaccatcgccccggtcgcgaagctcgatgcgcgcccggccccctggtgcacggtggccagctcggccaggcgttccaggggcaccgccccggcgcgcgtgatcacatgcccgctggtgtcggtgagcgccgaccagccgtcgatgatctgggccgtggtggacaccagcgcatgggccgcatcggcccgtccgaccgccccgatgaggcgtcgctgcgcccggttggtgcgcaacaggttcgcctgctcggcactggcctgcgcctgcgagaccgccttcaccaccgccgagaagggaatcgcccaggggatctcgaacagcggcaggccggcctggtgggcggcggtgagcagtgatccgggcaccgtttcgtgctgcgggcccaggccgaagcccagcgccaccaccgaggtgtcgcgcagccgttgcgcatagtcggcgtacaggcgacgaccgtggtccgaatcggcctcggcgccctgcggcaacaccgccccggtggtgatgagcacctcgcccggctcggtgaaaccggtggaatcgggcagctcgctctggtggatccaccgcacggcacggtccagggcaccctcgccgccgggctcgcgcagcacgaggcgcagttcgggggccgccagcaggtcgcgcaccgtgatcgccatggcagcaggctacgcgcgcggtacatacgggaccatgcgcgtccagaaagtgtacgagacggcccatggacgggccgtggaccgttcctaggctggcgccaaacagtacggatccccggttgaacaggccacgaaccgacgggccacggaatccgcagcgacgacccgaggaggacgatgtgatcacctacgaggactacaagcagtacctcagccctgcgctgtcgaaggccaccaacctggtgatcgaccacggcgagggttcctatgtgtgggacgtgagcggacggcgctacctcgactgggtgcagggcatcgccgtgaacgcgctgggccattgccatccgcgcgtggtagaggccatccgcgagcaggtcggcaaactgctcacctgttcgttcaacgtggtgaactacgagtccaccctcaagtgggccaagcggatcgccgagatcgcaccgggcgaactgggcagcaccttcttctccaacggcggcgccgaggccaccgacggcgccctcaagctggccaaggcgtacaccgggcgtccgggcatcatcgccttcaagggctccttccacggacgcacgatcgccgccacctcggtgaccgcctcgagcgcccactaccgcgccggctacgacccgctggttcccggcatcgacctggtgacctatcccagcgccgaccagtcacccgagggctacaccgacgaccagatcgccgactgggcgctgcgccagctcaccgacctgttcgcctatgtgcgcgacccccattcggtggccgccgtgctcatggagccggtgcagggcgagggcggctatgtggtgccgcccaccaggttcgtcaaggcgctgcgccagctgtgcaccgacaacggcatcctgctgatcttcgacgagatccaggccggctacggacgcaccgggcgcatgttcgcctccgagaacttcgacgtggtgcccgacatcatgaccatcggcaaggcaatggccggtggactgccggccagcggcgtggtgtccacccccgagatcatggccgcctggggtccgggacgccatggcggcaccttcggcggcaacccggtggtggcatccgccgggctcgccgtgctcgacgtctacgccgagacccacctgctcgacaacgtcaacgccgtcggctcctacctggccggccgcctcgacgagctgaaggacgagttcccgatcgtcaccgacgcccgcggcctgggcctgatgcgcgccatcgagctcaaccacgtcgacgggcgccccggcggtgacctgctggaggaggtgcgggccatctgcctcgacaagggcctgatgaccctgtcgtgcggggtgcgccacaacggcatgcgcttcgccacgcccctcaacaccaccaccgagctcatcgacgagggcctcgacatcctgcaccaggccctgaccaccgtctcggcacgggaagcgccccggcacacctccggcgccaccacgaagcaggcggtggcggcatgagcgagctgatggacgcccgacggcccgcccccgcgcgggccaccagctcggcagccacggcgccgggcgtcgccgagccgaccaccggcaccccccgggtggtctacttcaacatcgacggtgacctcgactacgagcacgcgctgctcgagcagtggggcatgaccgaccgcatcgacctggtggacgccaagcccggcgacaaccggcccgacaccttcgtgaaggccgtcggcgacgccgagggcgtggtggtggagtacttcgaggtcaccaatccggtgctcgaccaacttccccacctgaagatcgcggcggtgcaggcgatcggctcgtcgaacatcgaccccgatgccgccaccgcccacggggtggccgtgacgaacgcccccggattctgctcacccgacgtggcgctgcacacggtgggcatgatcatcgacctggtgcgcaagatcagcttcctcgaccgctcggtgcgggccggcagctgggacccgatgctgggcggcctgccgcaccgcatcaccgggaacaccatcggactggtctacttcggctcgatcccgaagctcatggtgccgatgctgcaggcaatgggcctgcgcatcgtggtgttcgcgcccaccaagagcgccgaataccttgccgagtggggcgtcgagaaggtggacacgctcgatgagttgctggcggtcagcgacatcgtctcgctgcacaccccgctcatggcggcgacccaccacctgatcggcgtccgcgaactggcgctcatgaagccgagcgccttcctggtgaacacggcccgtggcgccgtggtcgacgagcccgccctggtggacgcgctgcgtgaccgacgcatcgccggggccgcgatcgacgtgatcgaggacgaggaccacgaacggtccgagctgttcgggctcgacaacgtggtgatcaccccgcacgccgccttcatctccaccgaatcgctggccgacggcaagcgcatcgccctggaacaactggtgcagcgcctcgtggcgggcaagcgtcccgccaacctggtgaacaccgaactcgagatcggatagcccatgcatgcagtcgtcttcaacggaccccacgacgtggcagtgcgcgaggtcgccgagccacggatcaccgacccgatggacgcgctcgtggcggtacgcgccgcagccgtctgcggatccgacctgtggacctaccgcggcatggcctcggtggcgcccggagcccggatcggccacgaattcctcggccaggtggtggacaccggctccctcaccgaccaggtgcgcgtcggcgactgggtggtggcgccgttccgctactccgacgggcagtgtgaatactgccgtgccgggctcacctccagctgcacccacggcggattctggggccgcgaggtgctcgacgccgggcagggcgaactggtgcgggtgcccttcgccgactcgaccctggtgaggatcggcgacggtgacgaacccgacgagtcgatgcttgccgacctgctcaccctgtcggacgtctatccgaccggcacccacgccgtggtcaaggccgggttggacgcctattcctcggtggtggtgatcggcgacggggcggtgggcctgagcgccgtgatggcggcgcgccgcgccggcgccgacgaggtgatcgtgctcggcagtgcccaccccgaccgccgccagctggccctgacggtgggcgccgaccggttcatcagcgtccgtggcgccgatgcggtgcagcaggtggccgacatcacccacggcgcgatggtctcgcacgtggtggagtgcgtcggcacccagggctcgttcgacaccgccttcggcgtggtgcgcgacggcggcaccgtgtcatacgtgggcctgccgcaccaggtgagcatcgacccggcacggctgttcatgcacaacatcacgctgaccggcggcatgtgccccgcccgggtgtacatgccgctgctcatggacgaggtgctggccggccgctcgcaccccggccgggtgttcaccgccaccctgccgctggatcgggtgggccgggcctacgagctgatggaccgccgcgagtcgatcaagtgcctgctggcggtgggcgcgtaacgcattcgtaaccgcatatcgagttcatatcgattcaatgaaataccaatgaaacatcgcgaagttagtgtcaccatatcagttgaagttggccagactaccgggtgggagatgccatggaagggttcaccgcaattatcgcggccgttccatatacggcgctcgtcacgctcggcgcattcggactcggatttgtcctcgcaattccgttgatgtttgcccggcgggcgcgcctcatggtggtgcggggtatctccggcttcatcgtcgacctggcgcgcggcatcccgccgatcgtctggctgctgatgatctacttcgggctccccaacctgggcatcatgctcgacccgatcccggcggccatcatcggcctgggcatcatcaccgccggctacctggcggagatcttccgcggcgggatgctggcggtgcgcaagggccagttcgaggccgccaacgccctgggcctgggcggctggacgtcgttcacccgggtggtggcaccccaggcgatgcgggccatgcagcccggcctcaccacctactcgatcggcctcatcaaggactcgtcgatcgcctcggtgatcggcgtcaccgagatggtctacacggccaacagctacgccaagatctcgaaggagggcgtgctgctgttcttcgaggcggcgctcatctacctcgtgatctcggtgccactgggcctgttggcgcggcggatcgaagcccacaagcaggaggcgagcgcacgatgagcgacacattcagcttctggtgggccaacctcccgcagatgctcggcgggctggtggtctcgctggaactcaccggactggccctggtgatcggcatgcccttcgggctgctgctcgccatcggcatgggctcgcgactggccccgctgcgctggctgtgcatcggcgtggtggaggtcggacgcggcgtgccggccctggtgatgctctacgtggtctacttcggcctgccggccatccactggtcgcccaccgccatggtgtgcgccgtgatcgccctggccttcaccaccggcggctacaccggcgaatacatccgcggcgggctggtctcggtgggcgagggcacccgggaggccggcctggcgctggcgatgcccaccgccgacgtgctgcgcttcgtggtggtgccccaggggatgcgcgtggcgatcccgtcgttgatggggctggccatccagatattccaggccacctcgctggcatattccattaccgtcagcgaactcaccgcccaggcatattccatcagttcatcgtcattccgggcgctggagatattcgggctcgccggaatcatctacgccatcatcaccattccggccacctgggtggccaaccgggttgagcgtcgcctcagcctgcgtgaatagcacgatgcctgtcgttgtcaacatgttccagcaaggatgtccattcgttccagcaaggagataaccatgtctgtttcattgtccaggattgcctgtgttggtgcgctcgccaccgccctggtgctgtcgggctgttcgggctcgtcgggttccggcgcgaaggtggcgtccgactgcaagccggcccacaccttcaacaccgtcagctcgaagaagctgaccatctcggcccccgacttcgcccccttcgtctcgaagaaggacaacacccagtcgggcatcgacgtggacgtgatcaaccagatcgccgccatggagtgcctgtcgacgaacttcctgcaggttgactacagcggcgccatcccggccgtgcagtccaagcgtgccgacgtggcgatcggcgactactaccgcaccaccagccgtgccgaggtggtgggcctcagcaaggcgatgtacgtcgacggcatgggcctggtgtcgaaggacggcgtgaaggacatccccaccgtgatcacccacaacgtcggcacggtggatggctacctgtgggtgaacgacatgaagaagctcatgggcgacaagctcaagatctacaagtcgaacgtcgagatgttcgccgacctcaaggccggacgcatcgacgtgggcatcgactcggtgcctgccgcgcagttccaggcggaccagaacaaggacgccggactccaggtggccaccgccaatccggacgaccaggtgggcgcgtcggtgaagcccgcacaggtgggcattccgtacacgaaggacaacgccgacctgggcaaggcgcttgacgacgacatcgccaccctgcgcggcaacggcaagctcgaccagatcttcaccgaccacaacgtcgacacgagcctcaccaagctcgacggcgactacctggtgcagagctgagcggtgcagcggggcaactgacgaacgcaactgaccaactgacgtaactgaccaacgcaaggggaagtcatgacacagcatgtagcagccgcaccagcggccgcgccggcagtgcggatgcccggcgactacgccatcgaactgggcggcatccgcaagtcgtacggcgaccacgaggtgctcaagggcgtctcgctgcgcgtcaagcagggggaggtgtgttcgatcatcggccccagtggcgccgggaagagcaccctgctgcgttgcgtgaacctgctggaggaacccgaccacggcaacatgatcgtcgacggccagtacatgcagggcggcatcaaccattcccgcaaggagctgctggagctgcgccgccgggtgggcatggtgttccagtcgttcaacctgttcccgcacatgaccgtgctcgacaacatcgtgctgccccagcgtcgcgtgctgaagcgcagccccgaggcggcgcgcgacaagggccgcgaactgctcgacaaggtgggcctggccgacaaggccgactcctacccggccaagctgtcgggcggacagcagcagcgggtggccatcgcccgggcgctcgccctggagcccagcgccatgctcttcgacgagcccaccagcgccctcgacccggaattggcccacggcgtgctgaatgtgatgaaggaagtggccgccaccggaatgacgatgatggtggtgacccacgaaatgaatttcgcccgcaccatcggcgaccacctggtggtgatggaggacggggcgatcctcgaggagggcgaccccgaaaaggtcatgtcacatcccgagaaggaacgtaccgccgaattcctgtcagcggttatcaacagataggaagatcatgacacccaagatgatatcgatcggcgagtccgtggcgtcgtacagccacggcaaggtggtgggcaacctgctgttcacctcgggggcgaccccgcacgacctggacaccggcgaggtgcggggatccacgatcgaggagcagacgcgcctgtcgatccagaccctcgaaaagatcctgacggccgccggctcaggattgtccgacctgttgcaggtgcaggtattcctcaatgacatcggcgccgactatgacggctttgatgccacctacaaacagatgattccggggcccttcccgccgcgtgccacggtgggtgccgaattgcccggatatcgcattgaaatgatcgctacagcatatgtgagtggggacgagtcatgagaacagtcattgtgggtgccggcgtgatcggcctggccgcggcctatgagttgatgaaggccggccacgacgtcaccgtgttggaggccgacggctacggcaaggggccctcgcacggcaatgcggcgctggtcaccagcgtgctgtcattcccggtgccggcgcccggcaccatcccggtggccgccaaggccgtgctcaccggcaccggcgccgtgtcggtgcgtccccacgtgcagccgggatacctgtcgttcctgctgcgcatggccctggccacgcgcaagtcggagttcgtcaagggcaccctggcgcaggacatcatgacccgcatggtgtccgacggctacggcgaatacctggccgacgggctgaagttcgagatgcacgaacagggctcgctgcacaccttcacccatcgcgaggccttcgaggccggcctggccgtgttcgacggcttcgaccggctgcgcgaccgcatccgggtgctcgacggccccgaggcggtgcaccgggtggaccccaccctgtcgcctgacatcccctacggctactacgcccccgatgatgtgcaggtggagccggcgtcgctgatgaaggcccttgtgggggccctggtcgacggcggggtgaacctggtggagcacagcccggtcaccggattccgacgctcgggcgaccgcgtcgtctcggtgatctgtgacaagaccgagttcccggccgaccacgtgatcctggcggtgggcgtcgccaccagggagctgggcaagaagctcggggtgtcggtgccggtgtactccggcggcggctactcggtggacgtcaacatcaaccgggccgagctgcgtccgcgcacgtcgatcatcaccgatgacacccacatcgccgtcaccccgctggcctgggggctgcgcgtgtcgagtggcatgatcatcggccagacgcacccgaagatcccgcagagcgtcttcaacggattgatgaacgacctgcggcaggcctatccgcacgtgcccctcgacgacgtggaaccgggctgggccgggctgcgtcccatgtcggccgacggcgtgccgatcgtcggccacctacccggctatgtcaacaccttcgtggccaccggacatgcgatgctcgggctcacctatgcgccgcccaccgcgcgcgtgctgcatgccctcatcgacggcgtcgcgcccgccgactacggcgccttctcgatgcgacgcttccagagggccgccgcatgaacgcgacgagcccctatggatacctggcccccggccagccgatcggcaaggtgtcgatggcgccgggccagaacatcgccggctaccacgtgggcatcatctacatcgaggacgtctggtatccgatggtgccgggcaatgtggtgaacgccagcacctgggagttccccgtgctgctgcagccggtgcgtggcatcgacatccccgccctgttcggccccgagcacaaggacctcagcaagcccgtgctggaggcctgccgtgagctggagcagcgtggcgtgcgggcgatcagctcggcctgcggcttcttcggccgttaccaggccaagatcgccccgaagctgggggtgccggcggcgttgtcgtcgctggtgcagatcccgtggattcgcacggtgctgcccggacgcaagatcgccgtgctcaccgccgattccgattcgctggaccccgagatcctcgaggcctgcggggtcaccgacacctccgacctggtgttctgcggcttccagtacgagccgcagttctcggccatcaaccagcaccgcggcagcttcgacaacaaccaggtggagcacgagctggtgtcggccgccgaggaggcgtgccgcgaccccgaggtgggcgtgatcctgctggagtgcagcgacatgccgccctatgccgcggccatccaggcggcggtgggcgtgccggtgttcgacttcaccaccctcatccgctggctcaatggggccgtcgcccagaggccgtatggcgggtgggtgtagggggggtggggttgggtttgggcccggtcgcggcccgtctcctccggctgggtctcgtcacccccgcgccctcggccgttttgccgccggtttccctctaagtgggcagttgtgcgggaatgacgccgcacaggtgtccacctagtgctggatcggtctggcatcggccggtcaatctgcttcagggaggacttttacgtcgtctaccctgcaaaagtcccccctgaggctgcttcgcgctgcggacgccgggtcctggcccgtttcgctgccgggtttcccctaagtgggcagttgtgcgggaatgacgccgcacagttgtccacttagcgaggtcttggggtgcgggccgcgtcccggggccggttcgggccggcgcggttcgggtcgtcactcagtggatggttgtggtgattagacgcgtcgaaaccatccagttaaggcccgatcccgtcgggcaggccagggataggtgcggataaagcaccacagacggtgctctattcgcacctatcaccgcgtccggcatcaggaccggcaggaccccggccacgtcccgtccctccggccgggtcttgtcaccccgcatccggtcactaactgggcagttgtgcggcaatgacgccgcacagttgtccacctagtgctggatcggtctggcatcggccggtcaatctgcttcagtgaggacttttacgtcgtctaccctgcaaaagtcctcactgaagctacttcgcgctgcgggcgccgggtccgggcccgagtgaatggggcttgggcgggaccaacgggcttgcccagcgggtttggggccggacgtgtcacctatgtgccgactcatggcgtcggaacggccggggacggcaagcgggtggggacgcgccccgcaagtggggccgacgtgccacgatgaggccatgagcacgctattcaccaagatcatcaatggcgacattcccggacgcttcgcctgggccgacgacacctgcgtcgtgttcgccaccatcgccccgatcaccgacggccacatgctggtggtgccgcgcgcggaggtgccgaagttcaccgccgccgatgacgccctgctcgaccacctgatgaacgtggccaaggtgatcggccaggcctgtgagcaggcattcgactcgccgcgcgccgcgctgctgatcggcggcttcgagatcgagcacctgcacatgcacgtgctgccggcatggggcgaggccgagctgagcttctccaatgcccgcgacgacgtgccgggcgacgaattggacgccgccaccgagcgggtgcgcgcagcactacgcgacctgggcttcggtgcccacgtgccgccggccatggattccgcggcgctggcctgaaccatggcccaccatgacgaacccccggcccggggcaggggagacacggcgcggggcgctggcaccacatcgtcggacgacgccgcgacctccccggtgcccggtgcggtgatcaccgtctccgaccgttgcgcctcgggtgacgccgaggacatctccgggccgctggcggtggagctgctggccgggttcgcggtgcagtgccaatcggcccgggtggtgcccgacggcatcgatccggtgcaggacgcgattgcccgcgccatctcggagggcgcccgggtggtgctcaccaccggcggcaccggcatctcgccgcgcgacctgacaccggaggcgaccgagccgctgctggtcgcccgcttggacggcgtggccgacgccatccgacgccgcggcgaggaacacgtggtcaccgccctgctgagccgcgggctggtgggcatcaccggccacggcatggattcggcggtggtggtgaacgcacccgggtccaccgggggagtgcgcgacgccattgcggtgctcgggccgctggtggcgcacctgattgaccagctcgacggtggggatcatccgagtcgctgaaccggtctaccgtttcggaaccggtgcgccccgtcccgggaccggtgcggcacccggactagtcgtcgcctggacgcgtccagtcaccggagcgtccgccggccttgtgcaccacctccgcgccacggatctcgaccatgcggtcgacgcccttcaccatgtcgaccacggccagggcggccaccgtgacggcggtcagcgcctccatctcgacgccggtgcggtcagccgtgcgcacagtggccgaaatgtccacatggtcgtgggcgagttccaggtcgacgctggcgccgtgtaccccgatcacatgggccaggggcagcaggtcgggcgtgtgcttcgccgcctggatgcccgcgatccgcgccacggccagcacatcgcccttgggtacggtgccctgctgcagggccgccatgatcgccggcgagcagtcaacccgtgcgacggcggtcgcctctcgcacggtgggcttcttgcccgtcacgtccaccatgtacgcggtgccatcggcacgcaggtgcggaaggccatcggcacgcaggtgcggaaggccatcagcacgctgatgcggcagctcgcccgccgtccgttcgtcgggctgctgattgccggcttgctgatcactcatggaagtcctcgctggatcgtcgcgcggacagcggcgtgcccgcgcgggtgtcaatgaactgcagccggtcgtcgggcgccacccgccccacaccggccggcaccacgcccaagccgtcggccagcggcagggacgccaccaggtgcgagcccgaacccaaccggtggatcgggtgcaccgcgccgtcggacgccagccgcagggggatgaactgggtcttggccggtggtgacgaccatccctcgccggcgctcacgtcgaccgtgcgtggtgctgtcgtcgtggcgcgtccggccagcaccgcaatcagccctgcggcgtacacatggaacgaaacgaacacgctcaccgggttgccgggcaggcacaacaccggcacccgaccctccgcgaccccgagcgtcccgacaccctgcgggccgcccggctgctgggccacgtggtggaagcgcacgcccatcggctcgagcacctggcgcaccacctcgtaggcgccggccgagatgccgcccgcggtgagcaccaggtcgacgtcgtgccagccggccagcgcctcccgcaggtgctgtgggtcgtcgtcggtgcgcaccacggctgccacatcggctccggccccgcgcaccagtccccgcagcagcacgctgttggagtcgggcacctggccggcggcgagctcgtcaccggctcccaccaactcggcgcccgtggtgacgatcccaacccgcggacgggggtgcacggccagctcgcgatatcccaccgaggcggccgcggcgagcgccgtcgcgtcgagcagggtgccggcggccagcaccggtgtgcccaccgccacgtcctcgccagcctgccggatgttcgcgccgcgccgagggagctcggtgatcgtcaccgatgccggtggccggcggacgcccggtgcgtgatcggtgtgctccaccttcaccacggtgtcggcgccggcgggcagcggtgccccggtcatgatgcgccaggccgtgcccgccaccagctcatggggcgaggtgtcgccggccgggatgtcgccggccaccggaaggggcgtgccgggcgtcacatcggcgaagcgcaccgcgaagccgtccatggccgaattggtgaagggcggaaccgccagtcgcgcgtccatatcgcgggccaacacggcgccgaggcaatcgcgcgccggacgcccgggggcaggaaaccccttgtcagggcgtggttcggcggtgcccccggtctgggcggacgagcgggacccgactcccgtgggctgtgtggcgggatcgtcgccgagcagtggcagcgtcagcggcgcgaggggcgcggccagcgcgtcgaccagcgcgcggtgttcgttgacagtcagtggttcatggccggtcagcggcttgtgggccgtcagcggtccctcgacggtcagtggctcgtggccggccaatggctcattggccctcaaggactcgcccccggcccgtggcccatggtccggcgcggagctgcccggggaagtgctcatggtgtgtctcccgtcgcatcatggcgggcagagctgtcgggcccgtcgaatctgtcgggtctgccggatctgtcggccgaactatcagacccatcggggccggcggcgaaggtcagcacgctgtagcggttgcgcgccgcgtccgccacgagtgcgcgcccgatcaagggctcgcccaccccggtgatgagcttggtggcctcggtggccatggcggtgccggcctgccccaccaccgaacccagcacgcccacctgcgggctcgcgggcgtcgtgcccggcggcggcacgtgtgggtagaccatgcgcagggtggtggccggcacccccgccggcggccgcgaccagaacaccgacacctggaagcccatcgacaccacggtgccccacaccaacggcacgccgctgtcggcacaccaatcggccaccaggtacttggccgcgaagttgtcggtgcagtcgatcacgaggtcccactcggcgccatgggcgtcgaggaaatcgcgggtgacattgccgaattgttcgacgcgcaccgaggcgtccagcgcgccgagccgtcgcgccgccgactcgggcttggccatgcccacatcggcctcgccgtgcagcagctggcgggccaggttggtcacctccaccacatcggagtcgcacacacccagcgtgccgacgccggccgcggcgaggtacagcagcaccggtgagcccagtccgcccgcgcccaccacgagcacgcgggccgcccgcatgcgggcctggccggcgggtccgatgcccgccaccaaccagttgcgacgatgccgggccaggcgcggatcgtcggcgtccacatcctcaaccggggttgacaaggggattcgcacgcccatcaggcgattcccgaccagctgtgcgtgccgtcggcaagctgttggttcttccacaccggcagctcggccttcacctggtcgaccaggtcggtgaccgcggcgaaggcgggtccgcggtgtggggcggccacgaccaccaccatcgccgtatcgcccacctcgaggtgtccgatgcggtgccaggcctcgatgcggcccagtccgtcacgctcgccgatgccggcggcaatgcgtgccaacacccgttcggcgctggggtgcgccgagtagtcgatggcctgcacctgcgtgccggcgtcgtggttgcgcaccacccccgcgaaggtcaccagcgccccgcagcgggggtccgccgcggcctgcgtgatcgcggccgcatcgagcggttcggaggtgatgccggtgcggatgtcagtcatggattcctcccaggatgcggatgtggccgtgcggggcaggcccggagttggcgtcggtgcgcggggtggatggtgcgcggggtggacggtgcgcgtgccgatcagccgccggcgaagggcggcagcacgtcgaccaccgcacccgcgggcagcggcgcatcacggtcggcggggcgctcgttcaccaggaaactcgacacccggagcaccttggcgagcccggcgtggcgtccggcaaggtggtcgacgagctcgcccagcgtggtggggtgcttgtcgacgctgatctcctgcgcgccgatctcgtcgaggccgatctgctcggaatcggtgccggcagcttcggcggcggcggcgaagtagcggatgtgcgtcatgggcttctcgctctgttcgggggattgggaatcgtgctgcccggtggtgcgtgtcagcaccagctcggcctccatgccgggtccgggtagatagcgtgcgaccacatcgtcgcaggcagtgagctcaagtgcacgctcgaccatgccgcgacgcaactccagcgccaggggatcgggctccggggtgccgggttcgtcgccgtcgccacctgctggacggcccacgggctggccgaacgggatggcggtgagcaccagggtggtcgcctgctgcgggtggacatgcaccccaaacccgaagatgttgaggaacatccggatcttctcgaggtggtcggccagcgggaactgcgattcgggcagcgagaaatcgtggtggtcgggcaccttcatcagcgtcagggcacgtccgccccagtcgcagcccacccggcgggcggcgcgcagcggatcggggacgttggcgcgcaggtagtcgaggaaggccgcgcagacctggtcgaacagctggggtgcacccacgggcccggcgggcacgtgtgccgaatagcccagggccgggcgtccgcgtcccgacgccgggagccgctgcgaggtgaccagcccgatccgcagcagcgcgtcgagcgtctcgcgcaccgagctgacgtggcggcccagctcgtgggccagctcggtgacggtgaccggcgaggcatgcgcgccgatgcgtgccagcagcgtgtactgcgcgccggtcaggtgcgtgatggtgtccagttggagcgtggtggacgccatgtcgccggtgtgcgctgtggacgcagcgttgtcagtggacgcagcgccggtcttggacacagtgccggtcctggacgcggtgccggctttggacaccgtgcccactggagacgcagcgccgactttggacgcagtgcccattggagccgcagtgcccgtggtggacgcagtgccggccgcctgcacggtcaccagccgcgcggcttcggggtggcggccacctcgcccttgcgggagcggtagaccacatagggacgcgtcggatagccgatcggtgctgacagcacgtgcaccaggcgcgtgaacggccacacgcagaacaacagcatgcccgccacgatgtgcagctggaacgccaacggcacggtggccatcaactcgggttgcgggttgaaggtggggatcgagcggaaccacaccgagatcgtctcgcggtagttgtagcccggatcgcccagcacctgcgtgctcacggtggcgatcgtgcccaggatgatcggaatgcacatcagcacataggtgacgatgtccatgcgcgtggtggccagtcgcaccgacttcaccacgatgcgccggtagagcagtccgcccaggccgatcagggtggccagcgccgccagggacccgagcacggtggcgcccaggtggtacatctgctcggacacgcccagcgcgcccgtccacgactcggggatcgccagccccaccacatggccggcggccacgcacaggatgcccaggtggaacatcggcgaactccaccgcagcagcgccgactcattccactcgctggaccggctggtccaaccgaactggtcggtgcggtagcgccacaccaatccggtgaccagcagcacgatcgacacatagggcagggccacccacaacaacatttcaaccagtgacatggtgctcacttccctcttccgtgggggctgggcgcgtgcggattggacgcgtggagcccgggttcgtgggtgttgggctcgtgggggccgggttcgtgggggccgtgttcgtggggcccgggctctcgggtgttgggctcgaggggctcatgcagggtgggacgccccacgcccaccaactcggtgggcgggccctgggcgatgaggcggcgataggcggccatggtctcgtcgctggcggcgggcagggtgcgcacgatggcctccagcaggtgggcatagggcgagtgcgccgaccgcagtgccgtgcggatcacctccagcccctcccggttggcggccaacagcgcctcgccggtgccggtgtcgtccagcgcgcacagctcgagcacgatcggcaggtagtcgggcagctcctcgcggacctggctgaaaccggcccggcgcatcgcctcacggaacgccaacagcgcctgcccgcggccacgggtgtcgccgtgggtgaaataggtcagggacagcgcgcagcgtcgccgctggtcgaacacctccacatagtgttcctgcagcgcccggacgcccaactgctcggcggccgcgcagaaggcgtcgatctcctcgcgcaccggggccggcagcgcccccacttcggcgcgcaccgcacccagggtggtggcgagcgcctcgtcgggatagtcgagcagcagcgaacaggccatccgcgcgatgcggcgcggggcgtcgtcaagcgtcacggtgtcggccaccggcacgctgggaaggcccacgaactcgcccatcagatcacctccaacggcagggtcgggccgccgggggtgtgcccgccggggaaggcgcgggcgtcatatcccaccgggcagccctcgagctcggtgatgccgggcggcatctcgggatgcgtggtgggaatcacgaagcggtcgtcgtacttggcaatcgacagcagccggtacatcgcctgcacctgctcgccgctcatgcccaccgccgccgcgatcgactcgtcgggcgggttgtccatgaacacatcgcgcatataggagcgcatcgctgccaaccggcgcagcgacagctccacgggggcgggatcgccggccgtgaacagcccggccaggtagtcgagcggaatgcgcatctgcgagatggccgacagcagcaccttgtggtcctcgccgtcgctgccactggcggtgaccgcgtcgaccaccgggctcagcggcggcacgtaccagaccatcggcatcgtgcggaattccggatgcaggggcagcgccacgccataggtggagatgaggtcccacaccggcgacgcctgcgcggcgtcgatccacgagtggggcacgccgtcggcctgcgcccgggccaccacctcgggatcgtgggggtcgagcaggatctcgcgctgggcacggtagaggtcgtgttcgtcggcctgcgacgcggcccacgacacccggtcggcgtcgtagagcagcacgccgaggtagcgcagccgccccacgcaggtttcggagcacaccgtgggcatgccggcctccagacgcggatagcacagcgtgcacttctcggccttgccggtcttgtggttgaaatagaccttcttgtacgggcagcccgacacgcacatccgccaaccacggcagcggtcctggtcaaccagcacgatgccgtcctcggcgcgcttgtacatggcgcccgaggggcaggccgacacgcaggtggggttgaggcagtgctcgcagatgcgcggcaggtagaacatgaacgagtcctcgatggtcttggccacctgcaggttcatcgccttcagcacggggtcggagtcgagggtctccatcgagccgcccaggtcgtcgtcccagttgggcccccactcgatggtgtcgatatggcgcccatcggtggacgacgtggcgcgcgccaccgggatgttgcgctccccggccggggcggtgagcagcttgtcgtattcgtaggtccacggctcgtagtagtcattgacgtcgggcagcgtgggattggcgaagatgttcgccagcgtcctggcccggccgccctgacgcggcaccagcgcgccggacttcgtgcgacgccacccgcccttccagcggtcctggtcctcccaggtgcgcggatagcccacgccgggacgggtctccacattgttgaaccaggcgtattccatgccctcgcggttggtccacacctgcttgcaggtgaccgagcaggtgtggcacccgatgcacttgtcgaggttcatgatcattgcgatctgcgccatgaccttcatcagaactgcacctcctggccgcggcggcgaatgagggtgacctcgtcgcgctggtttccggtggggccgtagtaattgaacgaatatgacaactgggcatatccgccgatcaaatgcgtcggcttgatcatgatgcgggtcagcgaattatggattccgccgcgctttccggtgctctcgttgagcggggtgttcatcgtgcgttcctgggcgtggtgcatgaacaccgtgccggccggaatgcggtgcgagacgatcgcccgcgccgacaccaccccgttgcggttgtgcgcctcgacccattcgttgtcgcgcacgccgatgcgctccgcgtcggcggggctcatccagatggtctgcccgccccggcccagcgtgagcatatagggattgtcgtagtactgggaatggatggcccatttgttgtgcggggtgagatatcgcacggccacctgggtttcccccgtggcggtgctacgtgcctcgccgagcgcctgcccaccatagatatgggccatgtccagcggtggacggaatatcggcagggcttcgcccaggtcgatcatccaatcatggtcgagatagaattgcggacgcccggtgagcgtatgccacggcttgttgcgttccacattctgcacgaatgccgaatagcgtcgtccgccatgttccgaacccgaccattccggtgaggtgatcaccgagcgcggctgcacggcggtgtcggcgaagctgatccgcttgtcctcgtcggcggcggccaggtcggccaactgggtgccggtgcgcgcctccagggtgcggaagccctgggtggcgaggcgtccgttggtggtgcccgacagcttgagcacggcgtcggcggccttgatgtcggtgtcgaccaggggcctgccggccccggcgccgcggccctggtcggcgcgtccgttcagctcgccgagctcgtcgagctcgcggtcgggatggaaggcgaccgtcttggtggtcatgccggcgctggccagcagcgggccgagcgtgtcgaacttgttgccgatctgggtgtagtcgcgctccacagccacgatcctgggcatggtgacgcccggcacccagccccgctcggcgtccacgacgccaccgggggtggccagctcgtcgggcgagtcgtgggtgagcgccaccgccagcgcgtcggtctgggtgcccaggtgggtggccgccatgcgtgagatgagatgcgccagctcctggaaggtctggaagtcggtgcgggcctcccacggcgggtcgaccgccgcgttgaacgagtgcacgaagggatgcatgtcggtgctcgacaggtcgtgcttctcgtaccaggtggccgccggcagcaccacgtcggagtgcagggtggtggaggtgttgcggaagtcggcggtccacatcaggtcgagcttgccggcgggtgcctcgtcgcgccaggtcatcgaggcgggacgatggtcggcgtcgagctcgctggcctgcacgtcgttgtcggcgcccagcatgtggcgcaggaagaactcggtgcccttggccgacgagccgagcaggttggtgcgccaattggccagcacgcggggcatgttctcgggtgcgtcgggatcctcggcggcgaagtgcaggcgcccggcgcgtagttcgccggacacatagtcacccggcgccatgccggcctcgtgggcctggcgtcccaactcgaggggcgaacggtcgaaggtggggtagctgggcatccagccgcgctgggccgattccaccaggcagtcggccgtcgtcttgccggcgaacgacgcccctcccagcgggttggccatcgcgtcggcgcgtgccccgtcgtagcgccactggtcggtggtgaggtagaaccagccggtggcgatcatctgccgggccgggcgctgccagtcgagggcgaacgcgtagttcgagaacccggtgaccggacgcaccttctcctggcccacgtaatgggcccagccaccgccgttgacgccctgggtggcgcacatcgtggtgagcgccaggaaggtgcggtagatgaggtcggcgtggaagtagtggttgacgccggcgcccatgaggatcatcgaccggcccttcgactccagggcattgagggcgaattcgcggccgatcttgatggcggcaccgctggcgacgccggtgagttcctcctgccaggcgggggtgcccggcgtggaggcgtcgtcgtagccggtgggccactggccgggcaggccctcgcgtcccacggcgtactgggccagcagcaggtcgaagacggtggtcaccaggcggccattgatccgacgcgccggcacgccgcggcgcacggtgccgccgccgaggctggcctggccgggctgggtgggcaggtcgaagcgcggcagggtcacctccaccggcgtccagtcgtcggtgtccatcagcgacagcaccggggtgacgccgtcgagggtgaggttccagtgcccggcgccctggtcgccgaagtggtcggcgagcgtgccgccggggtccttcacggtgccgtcggcgtcgagcaccagcgggcggaacgcctggttgtcggtgcgttcggtggtgccggccggcatcttgtcggcggtcaggaacttgccggggacgacctgtgtggccgcgttggtggcggggctgcctgaggcgggggcgtcggtggcggcgtcgtccagctcaatgaggaagggcgcgtcggaatagcggcgcatgtaatcgaggaagaacggctcgcggcgcctgacatggaactcggacaggatcacatggcccatggcctgggccagcgcggcgtccgtgccgggggccacgcgcagccagtcgtcggcgaacttggtgttgtcggcgaagtcggggctcaccgccacgaccttctggccgtggtagcgcgcctcggtcatgaagtgcgcgtcgggtgtgcgggtgagcggcacattggagccccacatgatcaggtactgcgcgttgaaccagtcgcccgattcgggcacgtcggtctggtcgccgaacacctgcgggctggccggcggcaggtcggcgtaccagtcgtagaagctcagcatcggcgcgcccagcagctcgtggaagcgcgatccggcggcgtaggagatcatgctcatcgccgggatcaccgagaacccggcgatgcggtcgggcccgtaggccttgatggtgtgcacataggacgcggcgatgatctcggtggcctcctcccagctgacgcgcaccatgccaccgtgcccgcgcgccgacttgtagctgcgcgagatggcggggtcgtcggtgatcgacgcccaggccagcaccgggtcgcccaggcgttcgcgggcctcgcggtaggggtcgagcagcgccgagcgcacataggggtgcttcacgcggttgggcgagtgtgttgggtcggcacataggtgacaggtgatgggtgacacctgagtcggcacataggtgacaggctcgggcatgtcgaagaaccatgttgcggtgatgtcggtggtgtctggatcgatgagcgtggcgcaggcttcgcgggagttcgggatcagtcgtcagcacgtgtatcggttggtcgctcgttatcgggccgagggccccgaggggctcgagccccgttccagggcaccgcggtcgcatccgaaccagacgcccgcccgggtgcgtgaacggatcatcgcgctgcgtcgacagttggtcggcgagggcctggacgcgggtccgctgacgatcgcatggcacctggagcgagacggggtccggcccccggcccattccacgatccgcaggatcctgcatcaggccgggctggtcaggcccgaacccgacaagcgtccccgttcatcattcatccggttcaacgccgacctgcccaaccagacctggcagtccgatgtcacccactggcaactggccgacggcaccccggccgacatcatttcctggctcgatgaccactcacgttgcctgctccacatctcggcccaccgtgccgtatcggtccacaccgtgctcgacacgttcaccgccacgatcgccctccacgggccaccggcctcgaccctgaccgacaacggcatcatctacaccacccgcctgctgggaggacccaacagcggacccaaccgcttcgagttgttcctggaggccatggggatcgtccagaagaacggtggaccccaccggcccacgacccagggcaagatcgaacggttccaccagaccctcaagagacgcctgaacgccaaacccgacgcccacgacatcgccgacctgcaaaccgtgctcgaggacttccaggacctgtacaaccaccgccgcccccacacctcactggcacgacgcacccccggcgacgtctaccgggccagccccaaggaccggcccgaccccaccggcccacgacccgtccgcgactccgaataccgcgtcaagcacgtgcgggtccccagggccggcgtcatcaccctgcgccaccacggcgccccacacgccctgggcgtgggcgccgcccacgccggcatctccaccgtgatcaccctcgacgcgaccaccgtcaccgttatcgacccgacgaccggacagatcctgtcgacccaccacatcgaccccgaccgacgctactggcccaacacccaacgcccacccggacgatggccgaaacacgatccctgagctgacacctatgtgccaactcatctgtcacctatgtgccgactcatgacacgcggttgggcgagtattcgtaccagctgaaggccgcgccgcgggggcagccgcggggctcgtactcgggcaggtcggggccggtggtggggtagtcggtctcctgggtctcccagctgatgatgccgtccttgacgtacaccttccacgagcaggagccggtgcagttcacgccatgggtggagcgcaccaccttgtcgtagctccagcgctgccggtagaaggcgtcggcgtcgcgtccgccggccaggaacagctggcgggtgtcgcgcgaggccttgccgcgtcgcagccagctgcccatgcgcagcagcggggagccggagtcgcccccgtcggttgcctggtcgtgctcatgctcgtgcgcgggcttctcatgcgggtcgtgctggcgctggctggtggacattggtgacctccaagaggggtggggacggcgcgatcagccggggaacggcgcccgcggacgggcgtagcgaatccagcagatcaccgagcagagcgcacagaatgcggcacagatccagaaccacacggcggcgttcatggcggacagtgcgatgccgatgaagaaggggccgaagctgccgatggcggcggtgaagccgatggcgccgccggcctggcgcttgggcatgatcatcggcatctgcttgaaggtgccggcgttgccgatgccggcgaagaagaacatgatcagcatcgcccacaggaagccggggaactggccgggatcgctggggttgaggaacagggccgcccacccgagcgtgaccaccaggccgacgccggagatgaacgtccagatggcgccgccgaagcggtcgcacagcgggccccagccggcgcgcaccagtgagccgatgagtgggccgaggaaggcataggtgacgccctgcggcagcgcggccatgccggcgaagcggctcgtctcgccgtaggtggagttgatgagcagcccgaactgggcgctgaagcccgagaacaggccgaaggtcatcacgtacatgagcgtcatgagccaggtgtcggggttgctgaagatgtcgatctgctggcggaagctggccttcaccggcacgtccttgagcagcgtgaacgccaggatggcggcgacgatcgtccacggcacgaagaagatcgccgcgttgtgcacccacaggtttccgctcgcggtgtgctcgggggccagccaggtgatgccgaacaggctgaagcccatgaggatcgggcccaccagctggatgatcgacatgcccaggttgccgatgccggcctgcagccccagcgcggtgccctgcaggcgcttggggaagaagtatcctgtgctgggcatatagcccgagaaggtgccgccgccgatgccgcaggtgaaggccaacaccatgagcacccagaagctggtgtgggggttctgcacggcgaagaaccacccgaacatcggaatgaggtagagcagtgagctccagccgacgagcttgcgggtgcccatgatgggtggcaggaacatgtagacgagccggatgaggccgcaggacaggcccggcatggcggccagccagtagagctggccggtggtcagcccgaagccgatggagttgagcttcggtgcgatggcgctcaccaggaaccagacgcagaacgccaggatcatcgaataggtgctgatcgccagcgtgcgccacgcgatgcgggggctccacgtggcggcgtcctcggggttccagttggtaagcacccgtccggacgtttgcagcgcggcacccggcgatgtcggggttcccgcaggcgtggtggccatgtcgttcctctcgcgacgctgcatggggtgggcggcgcaacccacgtgctcgacgatcgcgcggtgccggcagcgacaggattttcgacggatttatcgcgactaattctagggcgtgggggtgcccggtgtgtgcaccgggatcaacctccgatgcggctcatggtgcgcgacggcacggcgaaccagggctcgtcgaggccgtgggcgcgtggcttggcccacatcgcggcccgccaggcgtcggcaagctgggcgtcggtggccccgctgcgcagcagtgcgcgcaggtcggtctcggtggtggagaacaggcaggagcgcacctggccgtcgctggtgagccgcgtgcggtcgcaggcctggcagaagggggccgagaccgaggcgatgatgcccaccgtcgtgtcggcgcgtccgtcgacctgccacagctgggctggtgcgtgcgggtcgaggggggcggtggtgggttcggtgacggtgggctcggcggtgtgcggcgcgctggtggtcggtccggggtgctcgggctggacggtgctgggtggcatcccatctggcaacgctccggctggcagcgtcccggtcgtcggcgggggactcagctcggcgagctggtggcgggtggcgagcagttccaggatctcggcgcgcgagaccatggaggcgcggtcccaggagccctcggggccgatcggcatctgttcgatcacccgcagttgcagggaattgtcgaggcagaagtcgaacagctcgggcaggtcgggggcgttgatggcgcgggtgacaacggcattcaccttgaccggtgtcagtccggcgtcctgtgcggcgcggatgccggccagcacgtcgggcaggcgatcacggtgggtgatgcgggcgaagtgttcgcggtccagggtgtccagcgagacgttcacccggtcgagtccggcgtcggccagggcccgggcgcggtgggccaggccgagtgcattggtggtgagcgcgagttcgggggagctgccccggtcggtgcgcaggccggcgcaggcggcgacgatcgactccaggcccttgcgcagcagcggttcgccgccggtgaagcggatcttgtggatgcccaggtgggtgacggccagtgtgcacaggcgcgtcacctcggcgtcggtgagcatttggtcggtgggcagccaggccaggccctcgggcggcatgcaatagctgcaccgcaggttgcaccgatcggtcagggagacgcgcaggtcgtgggcggtccggccgtggcggtcgcgcagcgcaccatcggcgctgggcaggggggtggcgggcaccgtttcagagtacaagcgggtgacggcgtgcgaggggctgcggggcgggtggctgtgttttttgacggcatcaccccgcaatattcggctgatcgggcatgcccggcatgttcgggcgcgtgatgcgcgatgatcgggccatggcagccaccccctcaggtgcacgtcccgatgccggccggcgcggccgggtgggcgcggtgatcctggccggcggtggtgggcaacgccttggtggggtgtcgaaggccgacctgcggctggggcagcgtcggctgctcgacatcgtgctgtcgggattggtgcccgcggtcgatggtgatgcggtggtggtggcgccccgcgacgtggaggtgcccccgggggtgcggcgcaccctggaggacccgcccgatgggggtccggtggccgggttggctgccggtttggccgcgttggccggctctcacgccctggtgctggtgacggcggtcgacagccccggaatcgtcgacctggcgccgctgcttgttgccgcgctgtcggcccgccctgatgcggatggcgtggtggcccgtggtggcgagcccgcaccgttccgtcaatacctgcaggccgtctaccgggccggtccgttgcgcaggctgctggccgacgccgggcaggtgcgcaatcgcggtgttgcgcgcaccctgcgcgtcctcaacctggtggagatgccgagcccggcggacctgtgccgcgacatcgacacccccgatgacctcgactggtggcgtgggcgcctggtgtagggcgcggggtgacgtggcgggcgacgcgtggggcgtgccgcggtggatgctgtggcggcggcagagggtgccgggcatcagggatagggaggacttttacgtcgtctaccctgcaaaagtcctccctgaatgacgcttccggcccggccccgccctgacccggttccggccgttaagtgggcacctgtgcggcgtcattcccgcacagctatccactgagcgacgaatccgccacgaaatcacccggcacccgcgcgccgccgggacatgggccgtccggcctcccgcccgcaacacgaagacagggtcgagaaaagcaccgtagatggtgcttaatccgcacctatcctgcgtccggcggcttgtgggggctcagatctcgtcgagctggccgaagatgtccttcaacagggggatcagtaccgacagcgtgtcggcgaccccgcccttcgagctgggggacgccaccaccagggcgcccgtcttgtcgcgggccgtcacgcccaccacttcacgcgacagcggtgacagcggcgtgttggtcagcccatgggcgcggatctgctcggcgatgccgggaatctccacctcgatcgcctcgcgcaccacctcggggctctcatggcggatgccgaagccggtgccgcccagcacgatcaccaaccggttcccctcatcgaggctgtcgcggatctgctcggccaccgcatggtgctcctcggggatcaccaccggctcggacgtctgcaggcccgccgcagcgagctgttcgacggccagctggccgccgcggtcgggacgttcgccggccagcacgcggttgttggtggtgatgatcgctgcacgaatgcctgccaggtcgtagtcgctgtgcggcatgagggctcctcgctcggggtgggcgccagggcagtggcggctctggtggggatggcaccacactattcgagcccgcaggcggcaccgggtgcgtatcgccgggccgcccgcgcaattaccccgccccgcccaccggaccgtcgcccttggtaacttgacgcgtggtcgccgcggactcgcgccggccacccgtccccctctcacgaccccggagcgcccatgagaacccgcccattcgcccttgtcaccgcctgcctgctgtcgttgacgctggccgcctgcggctcgtccaagggctcggggggagcctcgtccagccagaacgccacgctcaccgtctatgcggcggcgtcgctgaccgagagctacgacgagctgggcaagcagttcgaggcgtcgcacccgggagtgaaggtgacgttcagctacgccggctcacagaccctggtcgaccagctcgacaacggggcgccggccgatgtgctggccaccgcgaacacctccaccatggccaaggccagcgacaagaagctggtgggccaacccaccaccttcgcgtccaatgtgctcaccctgatcacgccggccggcaacccggcccatgtcaccggactcgattcctcgctcgacagcgccaagctggtgatctgcgccccggccgtgccctgcggcgcggcgaccacccagctcaccgggctgctcggcgtcacgctgcatccggtcagtgaggaggacaaggtgaccgatgtgcgcgccaaggtgtccaccggccaggccgacgccggcatcgtctaccgcaccgatgcgatggcctcgggcgacgccgtggacacgattcccatcgccgatgccgacaaggtggtcaacgactacccgatcgccacggtgaccgcctcgcgccagcaggacctcgccgggcggttcgtcgccctggtgacctcgccggccggacgccaggtgctcgacgcccacggcttctccactcccggccagtgaacgacgcccggccccgccgccgcgcaccacgggtgtccccagcaccctggtggctggtggcactggccggcgtggccctggcctacctggtggtgccgctgctgttcatgggcgccaaggtgccctgggccagcttcggccgggtgatcaccagcgacagtgcccgcgacgccctgtggctgagcgtgcgcacctgcgcggccgccatcgtgatcgacctggtgctcggggttcccgcggccgtcgccctgtcgcgccggtggcgtggggtgcgcgtggcccgcgtgctcgtcgccctgcccctgtcgttgccgccggtggtggcaggcctggcgctgctggtgaccttcggacgcaagggcgtcctcggcgccggcctggaggccgccggggtgcacatcgccttctccacgatcgccgtggtgatggcccaggtgttcgtctccctgccgttcctggtgatcaccctggaggcggcgctgcgttcgcgcacccagggcctcgaacagaccgctgccggcctgggcgccggccccagcagggtgcttttcaccatcaccctgcccaccgtggcgcccggattggcccgcggcaccgccctggcgctggcccgctgcctgggcgagttcggcgccaccctcaccttcgccggctcgctgcagggcgtcacgcgcaccatgcccctggagatctacctcgcccgcgaggccgactccggcaccgcactgacgctgggtgtggtgctcatcgtggccgccgccgtgatcgtcgccctcaccgagtggcccgggcgtcggcgccgcccggccgccgaggatgagcccgcgtcgcccacgcccaccgatgtgccggacccggccgggcaacagcgcgccgccgccgtgccggtgcatgtcgacggtgcggtcacggcccgcgactggcaggtgtcgctcgacatcccggccgggcgcgtggtggccgtgatgggacgcaacggcgccggcaagtcgacgctggcccaggtgctggccggggcgttggcgctcgacagcggcacggcgtcgatcgggccgcaggtgcacgacaccgccaccaccttcaccccggcgcgccgccgcggggtggcgatggtgcgccaggacccacaggtgttcgcccacctgagcgtgctggccaatgttgcctacccgctgcgcgcccggggcgtcccgcgtgcggcggcccgacgcgccgcccacgcccagttggccgcggtcggggcagatcagttggccttccggcgcggcgacgagctgtcgggaggccaggccgcccgcgtctcgctggcccgcgcgctggtgttcgacccgcggctgctgatcctcgacgaacccacctcggccctcgacgtgcaggcccgcgcccgggtgacgcaggtgctggccgaccggctggcccaccgcggcaccaccaccgtgctgatcacccacgacgtggtggaggcggtgcgcctggcgtcgtggctggtggtgctcgagcatggacgggtggccgagcagggcgagccggcacggctgttggccgccccgaccaccgacttcaccgcccgcctggccggcctcaacatcgtctcgggcgccctgatcgtgggtgccgacgccctgcccggcatcgcgatcggctcgcgccggctggccgcggcccgcatcgaccccgacagcctgttccccggcactctgtccccaggcgagctgttcccgggcgcgctgcctccagacgcgctggcccccgacaccccgctttccgacagcatgcctcccgacagcatgccttccgccagcacggcccccggcgccgggttcccggccccgggttcgccggtgtcgctggtgttcgcgcccgaggccgtctcgttgttccgcgtgccccagcagggctccccgcgctcattgctgcccggcgtcgtgcaagcggtcgatgcggcatcaggccttgtcaccgtgcgtgtcgcgctcgacgacggtccggtgatctcggcccgcatcaccccggccgcctgggccgagctgcagctggcggtcggccagcggctgtggtgctcggtgaaggccacccaggtgcggctggttcccgcgccggcgcccgtcggcccctgagtcgccgtcgcggcgtccgcccggcaacccgcctccgccccgcacccgggttctcgcagggctcaacccggcgccacacccgagtcccggcccgccctcgccgacggtgcggataacgattaccatggaaaacagaacgagcattctaattggacggcgggggcggagacgacccgtcaaaaggggtgtcctatgagcgacgatgcgctgcgtcttggcctcgacgtggggtcaacaacggtcaaagcggtggtcatggacggcgggcgcatcgtgttcagcgactaccggcgccacaacgccgacgtacgcggcgagatgaagcgactgctgctcgacatccgcgaccgcttccccgacgacgtgctcaaggtggcaatgaccggctcgggcggcctgggcgtcgcccgcatgatgggcgtcgacttccagcaggaggtgatcgccgccaccgccgccatcgaacgcctcaaccccgaggccgacgtggtgatcgagctgggcggcgaggacgccaagatcacctacctgcaccccacgcccgaacagcgcatgaacggctcctgcgccggcggcaccggggccttcatcgaccagatggccaccctgatgcacaccgacgcgcccgggctcaacgagctcgcggcccggttcgaccacctctacccgatcgcctcgcgctgcggcgtgttcgccaagaccgacgtgcaaccgctgctcaaccagggcgccgcacactccgacatcgccgcctcggtgttccaggccgtggccacccagaccgtcgccgggctcgcctgcgggcgtcccatccgcggcaaggtgatcttcctgggcggtccgctgcacttcctgcccgagctgcgcgccgccttccgccgcgtgctcggcgaccacgtgcacgactacatcacccccgacgacgcccagctctacgtcgcgatcggcgccgccttcctggccggcggccccaccctgtcgctgccacacctggccgccgaactcgacagcgccaacgaggtgtcggtggcgtcgaagaccatgcgtccgctgctgctcgacgacgccgaacgcgccgaattcctcgagcgccactccagggccaccgtcccccagggcgagatggccgacgcgaagggccacctctacctgggcatcgacgccggctccaccaccatcaagtcggtggtgatcgacgacgagggcaccatcgtgcactccagctacggctccaaccagggcgacccggtggccgccgcggtaggcatcgcccgcaccgtgctcggcgcgctccccgccggcgccaacctggcgcgcgcctgcgtcaccggctacggcgaggacctggtgaagaccgccatccacgccgatgagggcgagatcgagacgatggcccacttccgggccgcgaaggtcgtctgccccgaggtcacctcggtgatcgacatcggcggccaggacatgaagttcctgcgcatccgcaacggcgtcgtcgactcgatcgccgtcaacgaggcctgctcgtcgggctgcggctcgttcctgcagaccttcgcccagaccatgggcaccgacgtgcgcgagttcgccagggtggggctggccgccgacgcgccggtcgacctgggcagccgctgcaccgtgttcatgaactcctcggtgaagcaggcccagaaggagggcgccggcatgggcgacatctccgccgggctgtcctattcggtggtgcgcaacgccctgtacaaggtgatgaagctgcgcgacaccggcgagctgggcgaccatgtggtggcccagggcggcaccttcctcaacgacgcggtgctgcgggccttcgagctgctcaccggcgtgcaggtgacgcgtcccaacatcgccggcctgatgggcgcctacggtgccgccctgacggccaggtcgcatgccgtcgacggcgaggtgtcggccatgatgagccgcgacctcgacgcattcagcgtggagtcgagccagcgcgtctgccagctgtgccagaaccattgcaagctcaccatcaccctgttcgacgatggtggacgccaggtgtcgggcaaccggtgcgagcgcggcgcgtcgctggaggcgcgtccccgcaagtcgcagatccccaacctgtacgactacaagtacaagcgcatcttcggctaccggcgcctgaccgacgcgaaggccacccgtggcgagatcggcatcccgcgcgcgctgggcatgtacgaggactatccgctgtggttcaccgtgctcaccgagctgggcttcaaggtgatgctgtcgggacgctccaaccacgacctgttcgaggccggcatggagtcgatcgcctccgagaacgtctgctacccggccaagctggcccacggccacatcgaatggctgctcgaccgcggcgtcaagaccatctggatgccctgcgtgagctacgagctcaagcagttcgacgaggccgacaacaacttcaactgccccatcgtggcgttctacccgcaggtgctggagaagaacatcgaccggctgcgtgagcccggcgtgcgcttcatggaccccttcctcaacctcaacgaccccgacaagctcgccgagcggctcgtggaggagttcgccgactggaatgtcacccgcgacgaggccaagcgggccgtcgccgccggatatgccgagctggcccacacccatgccgacatccgggccgagggcgaccgggcgctgcagtacatgcgcgagcacaagatgcgcggcatcgtgctggcgggacgcccctaccacgttgatcccgagatccaccacggcattcccgacaccatcgcccagctgggcatggtggtgctcagcgaggacgcactgaccaacggcatgaccaccaccggcttctcgcgtccgctgcgtgcccgcgaccagtgggtctaccacacgcgcctctacgaggcggccggccaggtgcgctccgaacccgacctcaacctggtgcagctcaactcgttcggctgcggcgtcgacgccgtgaccaccgaccaggtgcaggacatcctcgagcagggcgacgacgtgtacaccgtgctgaagatcgacgagatctccaacctgggtgccgcgaagatccggctgcgttcgctgcaggcggctgctgcggagcgtccggtgtccagcgaggtggacacctccgagccgatcacggtgccggcggccaccacccccgcgttcaccaaggagatgaaggccacccacaccgtctacctgccccagatggcgccgatccacttccgcgtgctggccccgctgttcaagcgccacggctacacgatggaactgctggagcatgccagccgcgaggacatggaatgcggcctgaagtatgtgaacaatgacgcctgcttcccggcgatcatggtgatcgggcagctcatcaacaagttcatcgacggcggtggcgaccccgagaagtcggtggtggcgatcacccagaccggcggcatgtgccgcgccacgaactatgtcggcatgttgcgccgcgggctggctgcggccggcttctcgcaggtgccggtgctggcgatctcggcgcagggcctggaatcgaaccccggcttcaagatgacccccaccatcgtgaatgcggcactgcagggcctgatcctcaccgacctgttgcagaatgtgctgctgcgggtgcgtccctatgaacgcgacgaagggtcggcaatggcgctctatcagcgctggaatgcgctggtgtgtgaattcatgaccacgccgcgctattcggccatcgagggacgcaagctcagcttcaagtggctgtgtcgccagatggtgcacgaattcgatgagttgccgctgctggatattccgcgcaagccgcgcgtgggcgtggtgggcgagatcctggtgaagttccagcccgacgccaacaacaacctggtggacgtgatcgaggacgaaggttgcgaggccgtgctgcccgggctgatgggattcttcctgcagtcgatggagaccggcgattggcgctgggagaacttcgggttgggacgcacctcgcgtcacgtcaagaagatggcgctgtggttcatcgagcagatgtcgggcaccgcgaatgcggccttggccgccacgcacggcaagttcgatgtacctgagtcgatccatacgatggcgcagcgcgcgcagcaggtgatctcgctgggcacccaggctggtgagggctggctgttggtggccgagatgatgcacctcatcgagcacggcacgccgaatgtgatctgcgcccagccgttcgcctgccttcccaatcacgtggtgggacgcggcatgttcaagacgctgcgcgagcgctatccgatggccaacatcacctcgatcgactacgaccccggggcctcggaggtgaaccagctcaaccgcatcaagctgatgattgccaccgcctacaagaatgcggaggattccgggctggcgggctggagcaatgacttcgacaccgattcgccgctcgacctgccctcagtgctgggtgccacccgtggcgacggaaatgcggtgaatgcgcgcgcctgagcggcccgggtgttctcccgcattgaattgttgatgcgggcctggactcctcagcgcgtggtcaccggcttgtccagagcggcggtggtcacctgcagggtgccatcgtcagccaggctcaccaccacatgcttggcccacttgtcgctggcaccggcgtggtcgatgcgacgatgccagccgcggctctcggggcgggcgatcgccgcctgcgccagggctgcggcaaccgcctgcaggttggtgccggtgagctcgtcctcgccgaagtcctcctcatggggcaggcgggccaggaagtcgctggtggtgcgcagcttctcgtgttcgcgacgcaggcccagcgcctcgtcggcgctcgtgcgcacgccggccagggcatcggtgggcaggaagccccgcagcgcgcggtcggtggagtcggcggcctcgggcagctcggcctgcgccaggtggcgtcccacggcggtgccgcccaccagggcgtcgatcagcaggccatcggcgggcccggacgccccgttggcgcccgacgatgccacctcgccggccgcatagagccccggcaccgtggtggcgccgacctcattgatcgcgatgccacccacgaaggcctgggcggcagggcgcaccgggatcacctggcgcgccgggttgatgccatgctcacggcaggcctgcgccatcaccacgtgcggggccaattgccaggcctgatcgccgatgccgcgggcgtcgaggaatgccgttgccccgggataggcggccatccagtcggccagccggatcgccagctcgtggtcgggcaggtgctggctctcgtccagcggaacgatcgtggagccggcggcgtccaccagttctgcgccggcctgacgcagcgtggggcccatctcggcggcggcctcgcccggcagtcgttcctctgggggggcgttcagggcggtgggggcgaaggagacgaactcgaggtcgcgcagtgcggcccctgcgcgcagggccatcgccaggccgtcgccgttggcgagggcgggggcagtggtgtgcgtccacaggcgggcggcgccaccggtggcgagcaccacggtgccggcgcggtagtcgccgatggtgccatcgccgcgtgacacgcgcagtccggccacatgaccgtcctcgtcggtgagcacgtcgacggcgcggctgtgcgtgtcgatggccagggtgccggcgggcagcagttcctgcacgcgcgccaccgatgccagggttcgctgcatggtcatgcccagtggctggcgggggtcttgttcgacgctggagatctggtgggccagggcgtccagccagtcgaggagctcgggggcctgctcgatgaggcgtccggcggcggtcgggtcggccaggccgtcacctgcggacgccaactgttcgcgcgtcgggggattgcgccagccgatgccgcggctcgtcgaccgggccgtggcggtgtcgagcagcgtcgaccggcagaccagcaccaccgggatgcgggcggcggccaacgggagggcggcgctcaatccggcggccccaccaccgacgaccaccacggcggcggacttgttccatgtgggtgcgggagcttccagttgccggcccaatcgcgtgcttgtcgacatgtcaactctcctggcgcccatggatcaatgaatccccctcagcatgccacgggcgccgggccgggggcgtgcggcgacacccctgtgaccctcacccccgtaacctgcggttcgcgtgaccctcgcccctcgtgacctttgcccttcgtcaccggcgttcctcgtgacgcccgccccccgtcacccccacgtgcgggcccaccgccccgatccggtcactggttgggcagttgtgcggcaatgacgccgcacaggtgtccacttaacggccctggcgacggctgtcggcaggataggtgcggataaagcaccgtagacggtgcttttgtcgaccctgtcttcgtgggtgtggccatgaggccggacgacccgtgttttggtggcgtccccgatgccgggcgccccgtgtcctgccggagcctccggcgtcgagcggttgccggtgctggattcgtcccctaagtgggcagttgtgcggcaatgacgccgcacaggtgcccatctagcggggtttcttgccggacgccgccaggcctcggcccacccacgcgggcgtgcgcgcccgcgaatgccgcgccgacgtggcgtccgcgggggctgcccgccgccagcgcacgggaatgccggcgtcgcgtccggtggttgacttggtgagtagtcagtgcgccgcctgtggaggcgacgcatcgtcaccccggacgagaggatcacctacgtggatgccgtgaggccatcgaaacctgcaggccgcaacaggccggacaagcacgacgacgggtcagaggaagcctctccggaacggctgaactggctgcgtgccggcgtcctgggcgccaacgatggcgtggtgtccaccgcaggtctggtgttgggcgtggcaggtgccagcgccgacaaccgggcgatcctcgtggccggcgtcgcgggtctcgtgtcgggatccatgagcatggccgccggcgaatacgtctcggtgagcacccagcgtgacgcgcagcgctcgggtctggccaaggaacgagccgccctggagcgtgatcccgacggcaagctcgaccaactcaccactgcctatgagtccaaggggatctcccacgacctcgcccggcaggtggccgtcgagctgaccgaccacgacgcgctggccgcgcacgccgaggtggagctcgacatcgaccctgatgagctgctcaacccgtgggccgctgccttcgcatccatgctgagcttcgcgatcggtgccgtggtgccgctgctgctgatcaccctggtggccccatccgcccgcgtgctcgccacggtgctcgcgtccgcacttgcgctggccgtcaccggcgtggtgagcgccaagctgggcggttcccccacgcgcgccgcgaccgtccgcaatatcggcggcggcatggtggccatctgcatcacctatgtgatcggcgccctgctgggctcccatctctgaggcgggcgacatggctgaccaacacccctttgcccgccactggaaccacaactcccactactacccgcgcatcgccgaactgctcgacgggcatcgcgtcgtgctcgacgtcggctgcggcgagggcacgctggcccgctacctggccaccggcgacacggtgcccgtgggggaacgtcgcgacgggttgaagcagccccagccggcaccggaatcgttcgatgacaaggatcttcgccacgaggtggtgggcatcgacgccgacgccaaggtgctggcgcccgacgcgcccggcgtgcacttcatgcttgccgacgcccaacagctccccttccccgacgccagcttcgacgccgtggtgagcgtcggggtgctgcatcacctcaatgaggacctggggctggtggagatgcgtcgcgtgctgcggccgggtggacgcctggtggtgatcgacaccgcgcgcagccccgtccccttcgggcccctggagatccgcgacatggcggccaacctcgtgctgggcctgggcaagacccggtggcgtcccgacacgctcaccgccgaacccgacctgaactggacgcagagccgggagctcatcgaggggaacctgcccggtgcccactggtggcgggtgcccctgtggcgctgggttgccgtgtgggacgcgcccgccgcccgccgcgcctgatcccggatcgatgggccggaacctccgctaagcggacagttgtgcggcgtcattcccgcactggtgtccagttagtgaccaggagagtgaccacgtgccgcacaactgcccagttagtgaccagataagcgtgcccagatgtgccgcgcggcgcgcccggatctaccacgcggccccttgtccggggtaactgggtccggggcaactgggggatggccgatcgctgcgggcgtatgtgcgggtgccccgcgacgacgcacaatggacatgggcccggcatcgaccgcgcccgcaccgctcgcagccccaacgccggggccacacaggaggcacaatgcgcatcgcgatgggcagcgaccatgccggtttcgatctcaaggaacacctcaaggaatacctgcagggcaagggccatgaggtgatcgacgtcggcacgcacagcactgagagcgtcgactacccgatctatggggcggccgccgcccgcaaggtcgccgacggcgaggccgccacggccatcgtggtctgcggcaccggcgtgggcatcggcatctcggccaacaaggtgcacggcatccgctgcgccatcacctccgacgtctacgccgcccgcatgtcgcgcgcccacaacgacgccaacgcgcttgccctgggcggacgcgtggtcgccgacggcctggccgaggagatcgtcgacgtgtggcttgccaccgacttcgagggtggacgccacgcccgccgggtcggtgagatcaccgcgctcgaggacggccaggacatcaccgccgacgaccttgacgagcacgatcagctgtaagcgcgacggccggacccgtcgccggcagctccggacgcgacggctgaacccgtcgccgcagctccagacgcgacggctcaccccgtcacccgtagccgccacacatgatcagggcctgccgcggccgagtcaccccggccatggcaggccaacaacccccacgctgtccacacctgcggtccccatatgcaggcccccacgcgcaggcccacacatgcaggcccacacctgcggaaccacgcagccggacagcactgtggcccggacgaaatcatcgtccgggccacagtctctcttccctcaccgaggtttcggccccgccaggccaaacctcagatctgccagtcgggttcgggctccagggagtccccgaacacctcgtggccgcgcaccatccccgcagccagcgtccatccggactgcgggtcgatgagcacgaatgcgcccccatggcgggtttccaggtagctctcggccatcaccggagcggccagcctgatgctgacgcgtccgatgtcgttgagctccagcgtgtcggtggtcaccggcgccatctcgtcgaggtcaagcttgccgacgatctggctgacgatcgccttcaccgttgacgtgccgtgcttgagcagcacgcgcgcgcccgggtgcagcggcttctcggccatccaggcaaccgtggcctccaactgcttcaccggctcgggggcgtcggccaccgaggagatgagcgagccgcgcggcgcgtcgatctcgtcggcaagacgcagcgacaccgactggcccgccaccgcctcgtcgagctgctcgccggccaggtcgataccggccaccgtcgaccgcaggcccgacggcaggaccaccaccggatcgcccacgtgtacgcgcccggccgagatctcaccggcataggcgcggtactcgacatattgcggatcaagcgcgccgccctggggacgcagcaccagctgcaccggcagccggaagccctccaccgcgtcgggcaccgggtccaggttgtcgagcagctccaacaggctcggccccgtgtaccagggcaggtcgtcggaacggtccacgatgttggcgccggtgagcgcgctggtggggattaccgtgatgtcatcgagacccacctcgtgggccacttcgcggatctgcttttccacaggtgcataggccgcctcgtcaaaatcgaccaggtcgatcttgttcaccgcaacgatcacatgcggcacccgcagcagggcacccacggccaggtgtcgccgtgtctgctgaagcacgcctttgcgcacgtcaaccagcagcacgagcacatcggcggtcgacgatccggtcaccgtattgcgcgtgtactgcacgtgcccggggcagtcggccaggatgtagctgcgctcggccgaggagaaatagcggtaagcgacgtcgatggtgatgccctgctcgcgctcggcccgcaggccatcggtgagcaacgccaggtcgacggtgccgagtcccttgtcgtggctcacccgctcaacggcttccagctggtcggccagcaccgccttcgagtcgtacatcaggcgcccgaccagggtcgacttgccgtcgtccaccgatccggccgtggccaggtgcagcagcgtgcgctgcgtcagggccgcctcgggattgactgtggtgtcagtaagagtgctcattgttagaagtagccttccttcttgcggtcctccatggcggcctccgacagacgatcgtccgccctggtcgcgccacgttcggtgatgtgggtggtggccacctcgacgagcacgtcgtcgatggtctcggcctcggacagcacagcgccggtgcaggacatgtcgccgatggtgcggtagcgcacatggcgcacgctcaccggctcgtcggcccccggcgccgtcaccggcgacaccggcagcagcatgccgttgtgctcgaacacctcacggtcgtgggcgtagtacaggctgggcagctcgatgtgctggtcggcgatgtagttccacacgtccagctcggtccagttcgacagcgggaacacccgcacgtgctcaccgggctggtgacgcgggttgtacaggttccacagctcgggacgctggttgcgcgggtcccactggccgaactcgtcgcgcaggctcacgatgcgctccttggcgcgcgccttctcctcgtcacggcgtccgccaccgaacacggcgtcgaaaccgccctcggcgatggcgtcgagcaggggctgggtctgcagcggattgcgggtgccgtcgggacgctcctggagccgtccgtcgtcgatgtagtcctgcaccttggccacgatcaggcgcaaccccatccgctcggcggtggcgtcgcggtaggcgagcacctcggggaagttgtggccggtgtcaacatgcaacagcgggaagggcacgcgtccgggccagaaggccttggcggccaggtgcagcatcaccacggaatccttgccgccgctgaacagcagcacgggatgctccagctcgccgacggtctcgcggaagatgtggatcgattcggcttccagcgcggccaggtggctgagcgcgcccgaggtgtcatgcgaggcatggttgctggccggctggccggcggacgtcgccccgcggaggctctcgggggagctggtgggctggccgaagatggacgctccggtgcccgaggggatgaaggaatcggtggtcgccgtgtcgacgagcgatgattccaacggcgggttgttcacggttgatgactctctttctgtggcggtcacaggtgcagtccgcactcggtcttggcgatgccggcccagcggccggatcggggttcctcaccctcggcaaccggttgcgtgcagggctcgcaaccaatggacgggtagccggcggtgagcagcaggttgatcggcacctggtggatcgacgcgtactcgagcacgtcgtcgaagctccaggcggccagcgggttcaccttcaccatctgatgggtctcatcccattcgacgacgccggcatgcgcgcggttcgcgttgtcctcgcgccggatcccggtgacccaggcctcgtagccggccaactcgcggttgatcggctccaccttgcgcagctggcagcacagggtgggattgcgttcgtagagcttctcgccgtactcggcgtcctgctcggcgacggtctgcaccggcgtcacatcgaagatgttggcgttgatggagtcgatgagggcatcacgggtgccgatggtctcggcgaagtggtagccggtgttgaggaacagcacgtcgacgcccggcgcatgctgcgagaccaggtgcggcagcacggtgtcgccggccatcgagcaggcgaccaccagcgacttgccgaaggtctcgtcggcccaggtggcgatctgctcggccgtggcgtcggcaagtgcgatgttcgcctgctccaccagggccttcagctcggcgaccgaacgcttgcgtccggggccgtggctcactggtgtgggtgtggcctgtgtttgggtgctcatcgaaggctgtcctcctcggctcggtgtgcccattgggcaaagctctcgtcgtccgcgcgctgctccaggaagcgacgcgtgaggcgctcgacatagtcagtgaggtcatcgggggtgaccttgagtccacgcacggtgcggcccagccccggatcgtcgcggttcgacgagacgagtccgccgcccaggtgcacctggtaggtctgctgcgtctcgccctcgggggtacgggtcagctggcccttcagaccgatgtcggccacctggatgcgggcgcaggaatgcgggcatccgttcatgttcagcgtgatcgggcccgggagcgtcacatcggccaggcgggtgtccaggtcgtcgaccatgcgcgcggccggcgccttggtctcggtgaacgcctgcttgcagaactcgatgccggtgcaggccatcgtgttgcggcggaacggcttgggatgggcggtgaggcccagctcctccatgtcggccacgagctggtcgacgcggtcgggttccacgtcgagcacgagcagcttctggtagggcgtgaagcgcacgtcgtcggagccggccttctcggcggcgtcggcgaccttggccaggatggtgcccgacaggcgtcccacggtgggggcgaagccgacgtagttgcggccgttcttctggtcgtgcacgccgatgtggtcgcccggctcggtgggtgcctcgggggcggggccgtcggccagcttgtggccgaggtattcgcgctccagcacgtcacgcagcttctcgacgccccaggcctccaccaggaacttcatgcgggccttgttgcgcaggcgacggaagccgtagtcgcggaacaccaggatcatcgcgtgccacacctcggccgcctcgtcggcggtcacgaaggcgcccagccgctcggccaggtgcgggttggcggacagaccgccgccggcccagatgtcgaagccggggcccagctcgggatggcgcacgccgacgaacgagatgtcattgagctcgtgggccacgtccaggctggggtcgccggtgaagcaggtcttgaacttgcgcggcaggttcgacacctcctcggtgccgatccacttctcgcggatctcggcgatcaccggggtgggatcgacgatctcgttggccgagacgccggccaccggggaggcggtgaaggcgcggggcgcgtcaccggcggtgtgcacggtgtcgaggcccaccgactcgagccgacgccagatctcgggcaggtcggccacgtcgatccagtgcacctgcaggttctgccggtcggtgatgtcggcggtgtcgcgtccgaagtcggtggagatcgacgccagcacgcgcagccgctggatgctcagcggcatgccgtcgatgcggatgcgctgcaggaagtacttgtcggaacgctcggtgtcgctcatcgtggcgttcgcggtgccgtccaggcccggcttgcgctgcgtgtacaggccccaccagcggaagcgcgtctgcaggtcgtcctcggggatcgaatcgaagccggtcttggagtagatgtcgatgatgcggggacgcacgtggagcccgtcatcggcggccttgaccacctcgttggcgttgagcggctcgtggccgtcgaccgcccactggccctcgggacgcttgttggacttcttcagcgacggcttgcgtgccgggggcgcgggcgtcgtggcgggcgactgcgcgggatcggcggctgcctggtcggtgcttgccttcgccgtggcggcggcgtccttgcgggaacggggggagggtttcgatgctgtcatcggattgatgtccttgatcaggagccacgtatgccagcgcacaccgatacacaggagtcgtcaggcacacgagcccggcgaaaaggggagagagaaagtgctgggcgcgcgatcaggcgagccgacaacacacatcggaagccacgagcctactgcgcagggcaacggcccgacgcatcgtgggatgggttccggtaagcatggcgccacaatagcagagcattcaaggccggcaatcacggtgtccacaatggccgggtatccgggtgtgagacggccgccgagtgaaatccgggttaattcgaggcattgtcgaaacggccgtccggacgtcacgaacatggctgtgactagggggaatacccgcgtcaagggtgggccagaggtgaggggccacccggtgtcggcgggggcgaattggcaccaatgtgtctcctggattgcaagaaccacccattgtgtgacctatagttccggtcatgatcacacggcagaggcaggcgccgtcgatgcgccgcgcgctgtgttgttgtctgtgccccgtgtgccgctgaccccgtccaaaccggttggcgcacccgatcaggcgaggccgagggcccccggggagtggcgcaaccatgtgaccaacatccccatgtcgcacgatcccatgctctgggatacgacaggaaccagctccggacccaccactgggtttcccaccacttgatcgggctgcgcggcttccggctgcgggtgatggcggctgaccatccggccaccaccaacgagagacccccgatcaatgacctcacgattccccaccgcagtgccccggggtgctgcgcacgcatccggtagccccggaccccgtccggtgagccggcggcgcttcctgctcggcgtcagcgccgtggtgggtgcctccgcactcggcgcctcggcgctcgcgggctgctccaacctcgcctcggccggcacgcgcgccggccagctgaccatcgtcggcttcgccgtgctctcggaggccgacctcggcctggccgcagaatggggcaccaccccgggcggctccggggtgaaggtgcagacctccttcggtgcgtcgggtgagcagagccgcaatgtcgccaacgggctgcccgccgacttcgtgcacttctcgctgtcgtcggacatgacccgcctggtcgacaagggcctggtctcccaggactggaagaagggcgctcacaacggcatcgtcaccaagtcggtggtggtgctggtggtgcgtcccggcaatccgctgggcatcaccggctgggacgacctggcccgccccgacgtgaaggtggtcacccccaatccgagctcatcggggtcggcgcgctggaacatcctggccgcctgggcccacgtcggcgccgacggcaagcacgatgaccaggccgaggacttcctgggcaaggtgctcggcaacaccgtctcgctgcccggcagcggccgcgacgccaccaccgcgttcacctcgggcaatgccgatgtgctcatctcctatgagaacgaggccatcctggcccggcacaagaaccccggcgtgttcgactacatcgttcccgacgacaccctgaccatcgagaacccgggcgccgtgctcaccaatgcccagagcgcctcggcggcgtcctggctggacttcgcccactccgagcggggtcagggcgtgctcgccggcttcggtttccgtccgctcgccggtgcggtgcccgcccaggtggtgggcgccaatgacccgggcaatccctatccgacgccggaccggttgctgacgatcgacaaggacttcggcggctggtcaaaggtcaacaagaagttcttcgcagacggtggcctggtcaccaaactcctcagcaaggtggctagctcatgagtcaacacagtgtgggtcaacacggtctgggccaacatggcccgggtcagctgggcctcggcctgctggcctccgacaccgtcatctcgggggtcaccggcatcgccggggccacggagatccccgcccgcgccacgcgtcccgcacgcaccgacgccggcgagacacccgcctcgcgcgccctgctgggtgctgtctgggacgccctgcgctcccgtctgcgtcgctccggcggcgggaagggcaacggaggcgaatcgaagtcggggcgtcgcgccctcaccggctcgtcgggcatcggcctgggcgtggcggtgctgtggttcagcctgctggtgctcatcccgctggccgcggtggtcggcacggccgccagcggtggcgtcggaccgttcgtcgcggcgctgaccaacaagcagaccctcaacgccatcctgctcacctccggcatctcgctgctggtcaccgccctaaacgtggtggtgggcacgctgatcgcctgggtgctggtgcgcgaccgcttctggggacgctcggtgctcgacgtggtgatcgacatccccttcgcgctgcccaccgtggtcgccggcctggtgctgctgtcgctgtacggcgacggctcgccactgggcatcgacatcgccaacacccgctgggcggtggtgttcgcgctcgccttcgtcaccctgcccttcgtggtgcgggcggtgcagccggtgctcgaggaactggacaccgacgtcgaggaggcggccggcctgctcggcgccagccagccgacgatcttcgtcaaggtggtgctgccgtccctggtgccggccatcacctcgggtgccgcgctgtccttcgcccgcggcatctccgagtacggctcgctggtgctgctgtcgggcaacctgcccaaccgcaccgaggtggtcagcgtgcgcgtgctcagccatatcgagaatggcgacctggtctccgcgtcggcgctggccaccggaatgctcatcatcgcggccctcgcgatcttcgggctcgatgtgatccgcaggaaggcggcccgtcgtgattcgtgaaccccgccccgtgaaatggggcctacgactgttcgccatcgcctatctgacgctgctggtcgcctggccggtggccctggtggtgcgcaacaccttctcgtcgggcttcggcgtggtggcacagaccctgtcgagcccccaggtgacctcggcgctgcgcctcaccgcgatcgtcgccggcatcgcggtggtgatcaacctggtgttcggtgtgggcatctcgctgctgctggtgcgctaccgcttccccggacgacgcatcctgtcgctgctcgtcgacctgccgatgtcggtgtcgccggtggtcgtcggcctggcgctcacccttgtgtacgccaaggacgccgccctgggcggggccctgttccatgccggctaccgcatcatcttcgccacccccggcatggtgctcgccaccgtcttcgtgtcactgccactgatgatccgcgagctcgtcccggtgctgcaggagatcggcgacgaccaggaacaggccgccaactcgctgggcgccagcggctggcaggcgttctggcgcatcaccctgcccggcatcaagtgggccgtcgtctatggcgtcgtgctgtcgctggcccgctcgctgggcgagttcggcgccgtgaaggtggtctcgggcaatgtctcgcagctcacccagaccgccacgctcgccgtggaggagacctatcagaacttcgaccagcagacggcctacacggtggccctgctgctcaccctggcgaccgtgatctcgatcatcgtcgtctcgatccttcgtcccaaggagaccgcaaaatgagcatcgaaatcgagggcctcaacaagtcgttcggcgacttcgcggccctgactgacatcaacctgaccattcccaccggcgagatcaccgcgctgctcgggccgtccggcggcggcaagtcgacgctgctgcgcatcatcgccgggctcgagaaggccgacaccggcacggtggtgatcgggggcaccgacaccaccacggtgcccgcccgcaagcgcgacatcggcttcgtcttccagcactatgcggcgttcaagcacatgagcgtggccaagaacgtcggcttcggcctgaccgtgcgcaagcgccccaaggacgagatcgccgagcgcgtcgatgagttgctggggctggtgcacctgagtcagttcgccgaccgcctgcccgcccagctgtcgggcggccaacgccagcggatggcgctggcccgggccttggcggtgcgtcccaaggtgctgctgctcgacgagcccttcggcgccctggacgccaaggtgcgcaaggagctgcgcgaatggttggcgcgcctgcacgagcagatgcaggtgaccaccgtgttcgtcacccacgaccaggaggaggcgctggagttggcgcagtcggtggtggtgatcaaccgcgggcgcatcgagcagatcggcgcgcccgaggagctgtacgacgagcccgccaaccgcttcgtgatgggcttcctcggcgacaccaccaccctggatggtcagctgatccgtccccatgacatccgggtgcacgccgagccgcgtcccggtgccatccccggcatcctcgagcgggtgcagcgcatcggcttcgaggtgcgcctcacggtgcgtcccaccgagccgggccagccggaggtgacggtgcagctcacccgcaccgtgcacaagaccagcggcatcctggagggcgacgcggtgtggctcgagccgctgttgggcgcgcgcaccgtgccggcggtggttcccggggaggacctcgagacgccactgaccgacgccgatgagcaggaggttggtgcgtccgggaccgagacggttgcggcctgaggattggctgggaggccggcagaagccgggcgcggcaacccgaactgtcactgagtgggcagttgtgcgggaatgacgccgcacaggtgtccagttagtggggcttcataccgatcacgcccggacggggtgaccacgcgcaccgacaccagcaacgtcgacaccagcaccccgcgacagaaaaaaggaccgccctccacgtcgtccgcccggcaagggtcccctatgaccggtccgcgtggccgacggcaaggggctcgcagattccgtgcgcacacgcgctggggcctccgggctcgatctggatggtcgcatggtgcaccgccaccgggaagtgctccgcgacgcattcgcgcacgtcacgcagcacatcggcggcgtggccgtcggtgaggcattcgtcgtcgagcacgacgtgggcggtgatcgtcggcaggccggtggcgacggtggacgcatgcaggtcgtgcacctcgcgcacgtggtcgagccccaggatgtgggcgcgcacctcgtcaaggtcgaggtcatcgggggcgaactccatgagcacccgggtggtctcgcgcatcagcgtgaaggcccgcggcacgatgagggcggcgatgaacagcccggcgagggcgtccgcacgctggaagcccgtggtggcgatcacgatggccgcgacgatcacgcccagggagcccagcgcgtcattgagcacttcgaggaacgcggcgcgcatgttgaagttcgcgtcgcggctggacgacagcaccacgatcgcgatgacattcgccaccaggccgacgacgccgaagaccaacagctcgttggcgggtacttccggcgggctcacgaggcgccgcacgccctcgatcgcggcatacaggcccacgacgagcagcagggtggcctggccgagcgccgcgatcacctcgatgcgccggaagccccaggtgcgtttggacgtggccgggcgcagcatcagggttgccgcgaccagggccaccagcagtccggacgcgtcggtgagcgcatgcgcggtgtcggtgagcagggccaggctcccggtgagcaccgagccgaccgcctgcgcgacgacgatcgtcgcggtgatggcgaaggtgagccacagtcgcttgcggaaatcgcccggacgcccggcgagctcggcggcgccggggccgtggtcgtggtccttgtgtcggtccttgtgtcggtccttgtgtcggccggggcgtcgcgtggcgcgcccgtccttgtgctggggtgcttccaccgggggtcctccttggtcggggcagtgccggggtgtgggtcggctggtgcgtgggggggggggttggtgcgtgtcagtaggcgtgcgtgggtagacgtgcggcgggtgatgtgcacgggatcggtgtgggtctcagggtcgtcgggggctggtgtggttcggtgggggggcgaggactggccttaacatcgctgaataacgatgctagcgaaggatggcgattatttgcaagggtgtcggccatcacccgttgcccgggcggcccggtcgtcgctggctacgattgggccatggacacggcaccatccggggaccaggacccggcggacaatgactgccgtgaacccgtcacgaccgaggcaatggtgcctgcggcggacctcttccacagcctgggcgacccgaatcggctgatcatcctgcaccacctgcagctgggcgagcaccgtgtcgtcgacctcaccgctcacctggggttgtcgcagagcaccgtgtcgaagcacctcatcgtgctgcgtgacgccggcgtggtcgcagtgcgtccgcagggacgtgcgtcggtctattcgcttgcgcacccggagaccctcgttgagttgctgagcgcagccgaacgcttcctcggactcaccggcggagcggtgaccctgtgcccgctgcacggccccggagtggtcgcggaccactgagtgtggcgtgccgccggtgtgaagacgtcgttagctgggcagttgtgcgggagtgacgccgtgtgttgggtcggcacataggtgacaggtgatgggtgacacctgagtcggcacataggtgacaggctcgggcatgtcgaagaaccatgttgcggtgatgtcggtggtgtctggatcgatgagcgtggcgcaggcttcgcgggagttcgggatcagtcgtcagcacgtgtatcggttggtcgctcgttatcgggccgagggccccgaggggctcgagccccgttccagggcaccgcggtcgcatccgaaccagacgcccgcccgggtgcgtgaacggatcatcgcgctgcgtcgacagttggtcggcgagggcctggacgcgggtccgctgacgatcgcatggcacctggagcgagacggggtccggcccccggcccattccacgatccgcaggatcctgcatcaggccgggctggtcaggcccgaacccgacaagcgtccccgttcatcattcatccggttcaacgccgacctgcccaaccagacctggcagtccgatgtcacccactggcaactggccgacggcaccccggccgacatcatttcctggctcgatgaccactcacgttgcctgctccacatctcggcccaccgtgccgtatcggtccacaccgtgctcgacacgttcaccgccacgatcgccctccacgggccaccggcctcgaccctgaccgacaacggcatcatctacaccacccgcctgctgggaggacccaacagcggacccaaccgcttcgagttgttcctggaggccatggggatcgtccagaagaacggtggaccccaccggcccacgacccagggcaagatcgaacggttccaccagaccctcaagagacgcctgaacgccaaacccgacgcccacgacatcgccgacctgcaaaccgtgctcgaggacttccaggacctgtacaaccaccgccgcccccacacctcactggcacgacgcacccccggcgacgtctaccgggccagccccaaggaccggcccgaccccaccggcccacgacccgtccgcgactccgaataccgcgtcaagcacgtgcgggtccccagggccggcgtcatcaccctgcgccaccacggcgccccacacgccctgggcgtgggcgccgcccacgccggcatctccaccgtgatcaccctcgacgcgaccaccgtcaccgttatcgacccgacgaccggacagatcctgtcgacccaccacatcgaccccgaccgacgctactggcccaacacccaacgcccacccggacgatggccgaaacacgatccctgagctgacacctatgtgccaactcatctgtcacctatgtgccgactcatgacacgggagtgacgccgcacaggtggccacctaacggccctgggtgcgggggtcagcaggataggtgtggataaagcaccgtagacggtgcttttgtcgaccctgtctttgtgttgtgggcgcgaggccggacgacccgtgcccggacgcgccggctgattccgggccggacgccactggctgggcagttgtgcggcaatgacgccgcacaactgcccagccagtgaccccgtcgagggctcataagccccgaggccgtcgagggttaatgagcccccgaggggatggcgcccaccgatcgaccggcgggcgcagcgtcctcaggcgcgacgcatataggcccgcacggtgagcggcgcgaagatcgccacgatgacggcggcgccgagcagcgtcagccagaactcgccgctgatcgtcgactggttgatgagctcgcgcaccgcagtgatcaggtgcgacagcggattgacgttggcgaaccacttcagggcggccggcagcgtgtccaccggcacataggcgttggacaggaaggtgagcgggaacagcacgatcatgccgaatccctgcacgctggccgcggtgcgggccaccacgccgagcagcgcgaagatccagctgatcgcccaggcgcaggccatcacgagcagtccggcgaccaccacgcggcccagtccgccggccgggcgcaggcccagcagatagcccatcgcgaaggtgagcgtggtggcaatggcgtagcggatggtgtcggccagcagtgcgccggccagcggtgcgatgcgggcgatcggcagggagcggaagcgatcgaacacccccttgtccatgtcctcgcgcagctgggtgccggtgaccatcgaggtggtgatcacggtctgcaccagaatcccggggatcagggcgggcaggtacgacgccacattgccggcgatcgcgccgccgaacagataggcgaacatcagggtgaacaggatcggctgcaccagcacgtccacgagttgttcggggttgtgccggatcttgagcaggccgcggtaggccatggtcagtgaattgcgcacggtctgggccaggtctgcgcggttgtgcaggccggtggcaaccggtgacgtggtgacggtggggttctcaacaagtgtggtcatgctgcattcgcctcccgggcggaagagttggtggacgtcgcggaggcgtcggtgcgtggggattcggtgcgtggggattcggtgggatcggcgctgtcggaagcgccggtgctgggatcggcgctgtgggtgtcgtggccggtcagggtgaggaagacctcgtcaagggtgggcttctgcacgctcagctcgaccaggccgatgctgtcggcgcgcagtgcgttgagcaggtcggtcacgtggtcgggatcggtcagcggcatggtgaggcggcccgattcggggctgcgcgaggcggccaccccgagcacgcgctcgatcaccgccatcgtggggacggcgtcggccggctcgcgcagggtgatgatcagcgaggcggaacccaccgagcgcttgaggtcgtcgggggtgccctcggccaccacccggccacgatcgatcacggcgacgcggtcggccagttggtcggcctcgtcgaggtattgggtggtcagcagcacggtggagccgccggccaccagcgagcggatggtgtcccacatctgcccgcgggtgcgcgggtcgagcccggtggtgggttcgtcgaggaagatcagcggcggctgggcgatcagcgacgacgccaggtcgaggcgtcggcgcatgcctcccgagaagttcttgagcggacgcgcggcggcgtcggtgaggccgaattgttcgagcagttcggtggccttggcgcgggcctggcgccgtgacaggcccaacagccgcccgaagatcatcaggttctcggtggcggtgagggtctcgtccaccgacgcgtactggccggtgacgccgatcagctggcgcacgattccggcctggcgttccacgtcgtggccgaagatcgtggcgctgccggcgtcgggacgcagcagggtggcgagcattgagatggtggtggtcttgccggctccgttggggccgagcacgccgtagatggcgccctggtcgatggccaggtcgactccgtcgacggcgcggttcgagccgaactgcttgaccagtccgtgcgcctcgacggcgagtgtttcagtcatggtttctcctgggaattgggtgttttggggcaggggagccccgggaaggggcctgagggctcaggctcgagggataggggggcggacgccgttggggcgggcacgctccccggcgggagacatgcggcccttcgatgacgggcgtcgcgggcggccgaagggtgatccggtcgtggactatggggcggccggagggtgctggtcgcgctgtgtggttttgcggggtgtgggtcggttgtggtgggtggggtggacgaaatgggtggggcgtgcccagtgggatggccccagtgacgcgggatcagtgggatggcccactggagcggacccagcggagcggacccagcggggccggctcggcgcggcggacccgttgggcggacccaccggacaagccgtggagcggccccggggcgtgaccggccgggcaggccgatcgccggggaaccggggcggcgctgctgtccgggttggccagtcgtgcgcgtgggcgtcggcgggggagccgggcccgtggatcagttccggcggcggcctcgtccgcccggccatccgaagcccgggccgcgtccctggtaggggcctgacgagggtccggcctcgggatcccagccgtcgttgtccacccagacccggcgcatcgtctgcaggtggcggtcgatgccgccggggatcgatgcctccaggccgtcgatcacctggtcgagcagggtgacgaactcccgctgttggtcggggtcgagcacggcgaagggatcaccgggcgcggcggggcggtcggagtcggcggcgcgtccccgggcggtgatctccaccacctgggcgcgtcggtcgtcggggtcgggatgccgggcgatctggccggattcctcgagcttgcccagcagctcacccagcgactgcggcctgatgcccagcaggtacgacagctccttctgggcgatcggtgagtgcagcgccagcatgtgcagcacgcgaccctggccctccatcacgccgcgtccgccgcggtcgcgacgcagctgggcctcgctctggcgcatcagcgcgaacaggtagaccagtcggccggtgacattcgtggcgacatcgggctggctgcccgactgccccctggatgcgccgtcgtcggaatcgtgcgaggggtcggcgcgcccggagaggtccgacccggtgggacgatccggacggtttggacgatttggacgatctggcctgtctggacgatccggacgaaccggcctgtctggacggtccggccgatcaggcctgtctggacgatccgcccaatcgggacgatctgcacgatccgtcccaaagggctgcgccgaggcattggaccggtcggggtcgtcgttccaccagtcgttcccccgcacgtcgttgccccgggggtcgtagccttcggaacgatggttccgggaggcattcctcgggacgccgtggtcgttgcgcggtcgaccccggtggcgccggttgtggccgccgttccccgcgttgccgcgtcctgcggacccgccgttccagctgcctgcggtgttcctggctgccatggcgtcctccctcctgaaccaagccttttgcgaaggttccttcacatacaatacgcaggacccttcagaagtcaacagggtccttcgtatttcttccggggagcctccggggcagccagtcggcgtcgccacgaaagtgctgctgaccagccccttcacggccgtgacccgaacctgcgcgggcgcgtccaaggcttccgatcaccgccacgagccccgcccggaggcgtccaggggggatcatccacccctgtgatacgcctgtgcgcgtgccatggcgatggctttgtgggaatcctcccgaccatgaggaccctcgatgtgaagtccgcgcgccgggacaggtaacctcagccctatgagaattggcattccacgggagtccctgcccggcgaacgccgtgtagctgccacccccaagaccgttccccagctgatcaagctgggttacgaggtggtggttgaacacggtgctggccagcaggcttcactgccggacgaggagtacgaggccgcgggcgcatcgctcggcgactcgaaaaccgtctgggacagtgacattgttctggcagtaaacgaaccgagcgtcgaggagctgggtgccatgcaccgcggcgccacgctcgccacattcctccatccgcgagagaatcccggcctcatcgaggccctgcagaaggccggcgtcaccggcatgagcatggacatggtgccccgcatcagccgtgcccagtcgatggacgcactgagctccactgcgaacatctccggttaccgcgctgtggtcgaggcggcctacgcctatggacgcaccttcggtggccaggtgaccgcggcaggcaaggtggcaccggcaaaggtcttcgtgatcggcaccggcgtcgccgggttggcggcgctgggcgccgccaactcgatgggcgccgaggtgttcgccaccgacgtgcgtcccgagaccgccgagcaggtggagtcgatgggcgccaccttcctcaacgtgaaggctcccgaggaggccgagcagggcgtcagctccgacggctacgccaaggagaccagcgacgactacaacaagcgcgccgctgacctgtacgccgagcaggccaagaaggtcgacgtcatcatcaccaccgcggccatccccggcaagccgagccccaagctcatcaccgccgacatggtgaagtcgatgaagtccggctccgtgatcgtcgacctggcagcgctgggcggcggcaactgtgagctcaccaagcccggcgagaagtacaccaccgacaacggcgtgaccatcatcggttacaccgacatgcccagccgcctgcccacccaggcatcgcagctgtacggcaccaacctggtgaacctcgtccggctggccacccccgacaaggatggcaagttcgtcgacgacttcgacgacgaagtgctgcgcaacatgaccgtgacgaaggacggcgagatcaccttcccgccgccgccgatccaggtctccgcagccccgaccccggcgcccgcggccgccgccaagccggcagccgaacccgccaagcccaagcccccgaagccctggtacttcctgttcggcatcgtgggggccaccgcagtggtgctcatcgcgctgctgacgatcgcaccgacctcgttcgtcacgctgttcagcgtgttcgcactggccggcgtcgtgggctactacgtggtctggaacgtctcgcatgccctgcacacgccactgatgagtgtgaccaacgccatctcgggcatcatcatcgtgggcgccatgctgcagctgccgaaggacaatccggcgatcatgatcatcgccgccctcggtgtgctcatcgcatcgatcaacatcttcggtggattctcagtcacccgccgcatgctcaacatgttcaggaaggactgatcggcgatggtgctcctcgaaactgattacatcaacaacttcatcaattcgacgttcatcgtctcgggcatcctcttcatcctggccctggccgggttgtccaagcacgagtcgtccaagcgcggtaatgcgttcggcatcctgggcatggccctggcgctgatcgctgccgtcgtctccatgatcaacggcgacaccaaggcaatcgcctgggtactgctggtggtcgccatgatcatcggtgccgccatcggcctgtggaaggctgccaaggtcgaaatgaccggcatgcccgagctggtcgcccagctgcacagcttcgtcggcctggccgccgtgctgatcggcatcaacacctacatcgagcatcccgatgcggacgccttccacatgtatgagatgtggatcggcgtgttcatcggcgctgtcaccttcaccggatcgatcgtcgcctggggcaagctgtcgggcaagatgaagtcggcgccgctcaccctgccgggccgtaactggctcaacctgggtggcctcatcgccatcatcgccttcggcgtctggttcgcgaacggcggcggctggctgccgctcatcctgctgacggtgctctcgctggccctcggcttccacctggtggccgccatcggtggtgccgacatgccggtggtcatctcgatgctgaacagctactccggttgggctgccgcgttcagcggcttcagcctcggcctcgaggtgctgatcgtcacgggtgccctggttggtgcttccggcgccatcctgtcgtacatcatgtgcaaggccatgaaccgcaacttcgtgtcggtgatcctcggtggcttcggtcaggagaccgcgaccgccgacgccggcccgcagggcgacatccatgaggttgacgccgcgcaggtggccgagatgctgaaggacgccgagagcgtcatcatcacccccggttacggcatggccgtcgcccaggcgcagtaccccgtcgccgagctcgtcaagaagctgcaggccaatggcaccgaggtgcgcttcggcatccacccggttgccggccgcctgcccggccacatgaacgtgctgctcgcagaggcccatgtgccctacgacatcgtcatggaaatggacgagatcaacgacgacttcaaggacaccgacgtggtgctcgtgatcggtgccaatgacaccgtgaaccccgccgccatggagcccggctcgcccatctcgggcatgcccgtgctgcacgtgtgggaggccaagcaggttgtggtgttcaagcgcagcatgagcgctggctatgccggcgtgcagaacccgctgttcttcaaggacaacacctcgatgctgttcggcgacgcgaaggcctcggtcgacgcgatcaatgccgcgctacctgccacggccgacgccaagtaggtgcccggccgtcgtgcggccttgagctgccgcgcgcggctgggttgaagcagcacttgcaatgacgatgggccgttcgcggcaccatcactgagaatgccaaaagggtccgatccccggggtgggggtcgggccctttagcgtgcggggggtcgaagtgtcactaagtggatggctttgatgcgtctaatgaccgtaaccatccacttagtggagctggggcccgggctggcgacaacgcttacaggggcgggggctgccgtcccacccccttcggtgcaggatcgatgccaactgccgggcgacgctgcaagggcgtgttgccacgtcgtgccagccgtagcgcagggtcacgagcccgcggtcgacgaggttggcattatcgcggcccatgtcacggaagcgtcggtgctcatggtgggcgcggccatcgagttcgatgatgaggccgtattcgggaatcaggcaatcgacccgcgtgcgtcccaaccacacctgacgctcgccttcgggcagcccgtgatccctgacgacgttgcggacgtagcggctttcaagcgcgctttcgacgcccggcaatgtcatgcacatgtcgaggatcagctgacggtgcctttgccgcgaacgcgcccgggccgcgtccagtagctgcgtcgaattgacccgtccggagctgagcgcagcggcaatgagtgcgacgtacccatctgcatcgcagtccttggccgcatcaagtgcgctctcctcaggccaggtccgcggtggggatccgtgcccacggcggttccctcggcggaacgtcacagaatggggtgctttacgaaagctccggacaggggaccatatgacgacgtcttggggtgtctgcgcgatcaacccgtccaggaaagccgctgcgtgggagccgacaactgccccgggcccaaccgcgagcagccccgtccatgctaatccggtgggtggatgcagtagatgccgctcgccgtgcgcgtccaagaggctgccaacaggcgattgatggcggaccgagtgagcccgtgagctgcgcactgggtccacgtgaggcaaccgccctgacgggcagcaagcacgagcaggtcggtgccgggttcgatgcgcttcttcatgcccgcagtgtggttgcggatcgttcggattgtcggagggcggtggacctgtggatgattcagaccactaagtggatggtttggatgcgtctaatcgccaagaccatccacttagtggcctatccccaaccctcatcgcgtctcgcgcatcaccgctaccacatcgcgggcgaggggggcgttcaacagggtgtcgatgggttcgggcagcgcaagacgccagttggggtattcgtcaatggtgccgggcacattgggacgctcgcgcaccgcggcggcgtcgtcgaggctggcaagcaccacgcggctgggcgactgggccagcaaccggtagcgcgccaccacggcggcatggatgtcggcgttgctgatgcggtgcgccggcttggcggggtcaatatgggccatctcggccagcttgcggcggctgcgctcgatctgcgcccagtcggaacgcttgccgatgcgtcgcagttcggcggcatcggcgccggtgagcagcccggcgatcgtcacctggtcgtgcgtggacgacgtccccagcgccaactcggggaagtccgcgatgggcgtgcgcaccgccgaacagttcgacagcatgccgatgccgtgcatcgtctcgcgcattccgggagccaccgtacccatgtcctcaccgacgatccaggcgttggtgcgcatcgcctccaggcgcaggatcgcgagcagcgcatgcaccggatagtgcacataggcaccatcggcggggtcggcgtcgcggggaatccagaacagccgccacagctgcatcacgtggtcgatgcgcagcgcgtgggtgtgggccaggccgcgggccaccatgtcacggaaggcggcgaagtcggtgcgttcctccatctgcgggctgaacggaggaagtccccagcgctggccgtcctgattgtgctcgtcgggtggggcaccgatctcgaagtcgaagcacagctggccatggaaggcccaggcatcctcactgccgcgatcgaagcccactgccaggtcagcaatcacatcgacgccctcggtgcaggcgcgtccgtattgccagtcggccacccactggcaccagctgaagaaattcacgcggtcggcatgttcgtgggcgtagcgggccacgtcgacgccctcggggttgtgcagttcggtgggccagtcgggccagtcggggctgtcgaggtcctcggcgatggccgaccaggtggcgaaccgggtgagtgcccgtccgcggtggcggcggaactcacggaactcgatgttgggctcgtcgcgcaccgcctgccagatgcgttccagcgcctcccgcttgagggcccacacggcggtgcggtcgatcagccgctcatcgttgagggcgcgcccccgtgccgacaggtcggacaggttcacccgctccgcccccggcgcgaagccgggtgcgatgtgcagcaggttgaggaaatggcggctcgccggcgaatagggcgagtccttgggatgggagaccggcgcgatggcatgcaccggcgacacctgcacgcactgggcgccctgctgggcggcgatgcgacagatctggccgaggtcgcggaagtcgccgatgccccatgaatcgcgggagcgggcggcatagagctgcacctgccagccccatgagcgttgcggttcacgcaagtgctcgggggtggcgatgaccagccgtcggacgcccctcacggtgtacagcacgtgatagcccggcgtgttgacgacgccgtgggcctgcaccgggccgccgtcctcgggcacgagcgtgccgaacagctcggggtggtagcgcccgggggtgcacaccagcgccggaccgatcccgcggggcagcgagtcctcgaaggctgcactgaccagttcaagtgtggcggtgggcacgcggacctcccggccggtggcgtcgatgtaggtgccgttgacgcccagcggcaccagtcggcgcaggagcgcggcgcgttggacagggtcgtcgggggccggccggatgaaacggggatggtcgggctgttggccccgggcgccatccggggacgccggggtgccgggcttcctgtgcgtggacacccttccagcgtatgcggaaatgctcgacgacgatcgcgccgtgatcggctcagctgcccggcgatccggctcactcgcgcgtcaggcgcggctcggcttccagggcggtgatgcggcggtacaggcgggtgatgatctcggcgttgtccagcgccatctgcgccatcaccaggtggtcgtgggcgtgcaccaagagcaggtcgacggcgggctgaatgtcgcgtcggtgcgcctcggtgagggccttctgcacttggtgggcgcggtcatagctgccatgggcctgctcgatgagcgattcggcgtcgacgaagccgccgctctcggccgcggcgatggcgcgcatggccaggctgcgtgcttcgccggccagggcgatcatgcggaaggcgagcgtcgagggcgtgccggagggatcgttgagcgccaccagatcagccggcgggaggtcatctggcaggtcgcggtagttgcccgcatcgggcgtcgacgcggatgcgttcgtcgggcttgccgacgcgtcgacggaccggtcttctgtgttgtcgcccatggcattcagcctagtcgggggccgtgcgtcggtacccggcgagcggtggcgcgacgctcagccgatgaacttcttgtcgcggcgcagctcggcgtagacctcgctgaacaggcggtcgaactccttctgcatgcgggcggagctggtggcggcgaattcggtggcacctgcgccctccaccttcaccagggtgccgcccgtggcgggggcgaagctgacggtgaaccggtcgccgtaggtgagtcggctgcccttcgaggtgagctccaccacatggtgcgcggcgtcgtggtccttctgcgtgaagccactgtcgtcgcgtgcggtggccgcgaggacggcggcgaaggtgtcggcaggcctggccgcatagtgccgttggccgtggtgtttcctgccgatcccgaagagcgccatgcggcaacgctatcgccgtcgacgcagcggcccgcaggcaggactgggccatcgacgacctcccgcgcgcgagcccatgtggggatcgtcggacggttgcttgcgccggcgtccgggcggggtgctaacgtctggggcaataagcaaacacgtgcttcggggtcggtgtaattccgaaccggtggtgatagtccacgacccgtcacgctgcgcaagcagggcgacggttgatctggtgaaactccaggaccgacggtgaaagtccggatgggagaagttcacgtggcgccgcgaggcgtcgggcggtccattggtgggctgcaggcgcatccggcgttgggtgcgccccttcctgggtggttgcacaacaagccccgaggcctgtcctcgggagggcttcatgggcgctcatcgtcctggcaatggcagtggacgcgttgacgcgcgccgtgactcacagtcgccgttcgccccggcatcgtccgccttcgacgcgggatccgggttcgggccccgcgccgatgatgctgccccggacgtgggcgcgtccgcccagccgctgaccgagaagcgggtgctgccccgcgagttggcggcgctgcgtcgggccttcgaactgtcggcccgcgggccggccgacgacccgaatccgcgcgtcggttgcgtcctgctcgcccccgacggcggggtgatcgccgagggctggcatcgcggcgccggcaccgcccatgcggaggccgccgcactggccgccgcgcgagcagtggggagcgatgtgcgcggcgccaccgccgtggtctcgctggagccgtgcgcccactggggacgcaccggcccctgcgccgtggccctggccgacgccgggatcacccgggtggtcttctcggtgcccgaccccaacccggtggcagcgggcggcacccaggtgttgcgcgaacgcggcgtcgaggtgatcggcggcgtggcggaggcgtccggccgcgaggccctcggcgactggctggcccgccaggtggcgccgctgcccggcgaggtgggggcgcgtccgcaggtgctcgtgaagatggcagccaccctcgacggccgggtcgccgctgccgacggcaccagccgctggatcaccggccccgccgcccgcgaccacgcccacgggacgcgcgcccgggtgggcgcgatcgtggtgggcaccggcacgctgctggccgacgatccggcactcaccgcccggctgcccgatggctcgctggccgaccaccaacccctgcgcgtggtgatgggtacccgcccggttcccgacgacgctgcggtgcgcggtcccggcggtgccctgctggcattgcgcacccatgaccccgccgaggtgttgcgcgaattgtcctcgcgcggcgtccgcgaggtgctcatcgagggcggacccaccatcgcgtcggcattcctggccgccggcctggccgacgaactgcacgcctacatctccccggccctgctgggtgccggcgcccaggcggtatcgggtctgggcatcagcaccatcacctcggcgctgcgcttccacatcgttgacgtgcaccggctgggggacgacctgctggtggtcgcccgtccgcgttcaccgggctgagtcggcgtcataagcccttgtcaaccgcaagttctcgacccatcccgttttcaaccaccaacagtttcgctcacacagacaggatcaccatgttcaccggaatcatcgaagagatcggcaccatcgacaccagcgcacccgccgagggaggcggtgcccggctcgcgatccgcgggccactggccgtcagcgacgccacgcccggctgctcgatcgcggtcaacggcacctgcctcaccgtggtcgacctgcccggcgacgacagcttcgtggtcgacctgatgcccgagacgctgcgtcgcacgtccctggggcggttgtcgcagggctcgcaggtgaaccttgagcgggcaatgcgtgccgacgcgcgtctggacggccaccaggtgcaggggcatgtcgacggcctggcgacgctgctcgagcgcaccgacgccgacggctgggtggagctggagttcggggtgcccgatgcgctgggtccgctcatcgccgagaagggggcggtggcgctcgacggggtctcgctgaccgtcacccacgtggggccggcgtcgctgggggtcgcgctgatccccgagaccctgcggatgaccaccctgggcgggcttgaggtgggcgatgtggtgaatatcgaggtcgatccggtggcgcgctatgtggagcgccagttgcaggcggccggcctggtgggttcggtggccgacggggtcgccgcgggcgcgttgcaggaagcaggggtgcaggcatgaacacgatcgctgaggcgctggagcagttgcgtgccggccggccggtgctggtggccgactcgcagagccgcgagaacgaggtggacgcggtgttgtcggccgagctggcgacgcccgcgacggtggggtggatggtgcgccacacgtccggatatctgtgtgcgccgatgaccggtgagcgtgccgatcacctggggcttccgctgatggtgccgcgctcccaggacacactgcacactgcgtacacgttgagcgtggacgctgcgtccggtgtgaccacggggatttcgggtcatgaccggtcacgcaccgcgaacgtgctggccgatccggccgcgacgccggccgacctggtgcgtccggggcacatgttgccgctgcgtgcggtggccggcggggtgcgcgagcgcggcgggcacaccgaggcatcggtggagttgtgcgcgctggccggattggcgccggtgggcgtgatctcggagctggtgcacgacgacggttcgatgatgcggatggccgatgccgagccgttcgccgctgaacagggcctggtgctggtgaccatcgaggcgctgattgccgagttggacgcccggggcgctgcgccgttctcgtcgccgcgtgcggtgggggagtggaaccccgatcgggtgacgcgggtggcgcaggcgcacctgcccacgcgccatggtgacttcaccgtggtggcctatcgcgacctgcgcaccggtgccgaacacctggcgctgagcgcgggcgccgtcgccgaggcgctggatgggccggcgcggggaacgtcgcagcagagggcgccacagcagacggcacagggcgcgtcccagcagccggtgcagggcgcgttgcaacagaccgtgccacagcagggggcgccgctggtgcgggtgcattccgagtgcgtgaccggcgacgtcttcgggtcgcgcaagtgcgactgcggggcacagcttgatcgtgcgctggaactcatcgcggcgcagggcggcgtgctggtctacctgggcggccatgagggacgcggcatcgggctggcggagaagatcgccgcctatgccctgcaggagggcggcgccgacacggtggaggcgaatgtggcgcgtggttgggatcccgacctgcgcgaatacggtgccgcggcggcgatcctgcgcgacctgggcgtgcggcaggtgcgcctgctcacgaacaatcccgacaaggtgcaggcgcttgccggccaggggatcggcgtcgatcaggtggtgccgctggtggtgggcgtcacggcgcagaacatcgactacctgcgcacgaaggtggccaagatgggccacctgatggacgtggagtcgatgctgggtgtggtggacgcgggcgatggcccggtcttgggaaggcatgcgggccaaggcccggtctcagagaggcatgcgggcgggagcccggtctcagaaaggagggcctcatgagtggggttggcgcaccggcgttgtcggtggatggaagtggcatgcgcatcgtcgtggtggcggccagctggcacaccacggtgatggagggcctgctgggcggcgcgttgcgggcgttggcggcggcgggggtggcggacccgcaggtggtgcgggtgcccggttcgttcgagttgccggtggccgcgatgaaggcggcctcggcaggcgccgacgccgtggtggcgctcggcgtggtgattcgcgggggcacgccacacttcgactatgtgtgccaggcggcgacgtcggggctcaccgaggtggccctgcagacgcgcgtgccggtgggcttcggcgtgctcacctgcgacgacgaggcccaggcgctggcgcgtgccggactgcccggatccaccgaggacaagggtgcccaggccgctgaggccgcgatcgcgacggtgttggcgctgcgcgagttgtgagggctgcggcctcgcgggacatgacgggtgagcgaccggactttcccggtcggagccattagcggcactgggtgggcagttgtgcgggaatgacgccgcacaactgcccactgtggcgatgttcgtccgccggcggggtcggtcaccgggggccggtcaccaccagccgatcaccttgaaccatgcgccgccgaccacgaaccagatgagcagcgaggggatggagcacaggaagctgacgccccaccagcgtccggtggagttgtagcccgagccgaacagggccgggccggggccgccggagtactgggtgagccccatgctgagcagggccgtataggccagcgacatggccgcgagcatgggcggcgccccgagggcaagcgccgtggccaggaaggccgcgtacatcgcggagatgtgggcgaccgccgaggcgaagaaatagcgggtgtagaagaacacgaggatcagcaccaccaggcccatgtgccagccgatgccgcccacgccgcgggcgatgcccttggcgatccacccgacgacgccgtaggtgttgagcgccccggccatcatcaccagcaccgcgaaccagaagatggtgttccaggcggccttctccttgatgatgtcctcccaggtcatgatggacgtgaccgtcaaaatcgccaggccgatgaatgccgacactgtggcattgattccgaatgccatatcgccgacgatccacagcaacaggagcaatacgaaatcggccgtcagtaccttttcggcgcgtgacatcgggcccatgtccttgagctcaccgcgggcgaaggccgcgatctcgggggagtccttgatttccggcggatagatcttgtagaggaaatagggaagtgcgatgagtgccaccaggcccggcacgatcgcgccgacgaaccacgacgtccaactcatgtgcacgcccaggtcgccggccagcgaggccatgatcgggttgccggccatggcggtgaggaacatggcgcagacgatggtgtcgatctgcgagatggcgatggccaggaacgatccggccttgcgggcgctcggcccgggttcggatccgtaggcggtcgccaccgactgcatgatggggtacatgatgccgccgccgcgggcagatgccgaggggattccgggccccaacacgaggtcggcgagcgcgaatccgtaggcgacgccgatcatcttcttgccgaacacggagatgaagaacagcgcgacgcgtcgtcccagcccggtcttgatcacggcgcgggaaagcagcatggcgatgccgatgagccagatggtggagttggcgaagccggagagcatgcccacatcgcccttgccgggcactactggggtgagtccgaacaggccggagatggtcagtgcgaccaggcagacggcgcccatcggcatcaccttggcgatgatggcgacgatcgtggccacgaacagggccagcatgtgccaggcgcgcggctcgaggccgcccggagtggggatgaggaacattcccagaccgataatcaccgggatgagtgcgcgtttccaatcaaagaatatcttgacgcgcaccggcgcaaggggcggcgccttcgttggcttttcctgaattgtggacgctgttgaattgttgtcgtgggtggtcatcgttgggtcctccttgggcagaggatgtgtgggttaacgcgactacgacacacacgtttccgtcaaccactggaggatttccgcgaaatgccgtgggtggtgaacggtttccctaccggcgtgatgggccttgcggggtggggtggctggtggctcggtgcggctggtggcggggcaccgccagcgtccatggtcaagacatcgactcagtggacagttgtgcggcgtcattgccgcacagttgaccactcagtgggtcctggcacccgggcaggacgatttctgccgggccacccgacgcgcaggaccccgcagcggcctacgagttcgtctcgacgtcgaccgcagcaagcaactcggcaatctcgggattggctccggggtcaatcggcttcagttcacgggcggcgccctgctggatgcacaccagttccgtggacgcatcgttgaggatctggatcgcgttggcggtctgccactggatgccggtcagcgagccacgcgtgaacgacgcggccagcaccgcctcggcggacacatgcccgtaggcgtcgggccgcgtctggcggaacgcgacgatgtgcacgctcccgatcgccggggccgtggcgagggcctccttgacggtcaccaacacatagccgctgaccatcaacaggtagaggtcattgagctcggtcttggtggccttcttcaacgacgggttccctgcggcggtcgtgccgggcatgcgggtcggcacgacgtcgatgccgggcacttcgaccgtcagggacaactcgtccccgtggacgcccacggcggccgcagctgcctcattgtcctcgaacgctgcccccagggcggccatcaccgtcgcgggatcattggccaccaatccggtccagaagctgtcccacgcctgctgcagttcctggcggtccgcctcggcttgcgcgatgagctgctggcgctccgtctcgaccagctggggaatctgcgcccgggcctcgcgtcgctggcgtcgttgcaggatgttgaactgcgagacgacctgtgtctcgtacttctgcgccaaggtgtcggctgacgggacggcgggccggggaatctgcgggtgggtggccacggtgaagtcttcgcggtgcagggacaggatcttctggatcgcttcggcaagcgcgcggatctgctcagccttcgatgacccctgcaggccattcgtggctccccgcagctggcgcgatgccgacgaggtcgaggtgccgcgcccgccgccgccgagcggcgcgtagaccgtcaatggtccggcgccggtcgagatgccggcgcgtcccgtgccgaaatggacgcgtgcagcccgtgggccaacgctgacccgaaggccgcggctggaggcccgcacccgcacgcccttgctcatcctcattgaaaagcccatggcggcatcttctcatccgcacagggtcgtgggcgtcgtcctcgggaggtgattgaccggtgatgcgccctgttggaggcagcgcgctgtcccagctgtgcaactgtgcggtgcacgttcagctggcttggggctcaggccacgccctcgggggtggcgttgtcgttcaccctgccgatgatgcccagaatcgtgtcgatctcggggtcgggaaagaacaccgtgggtccggcgggcgcatcgtcggtgtagggcgactcgaagagtcgacgcggttccatcacgccactgtgggtgagctcatcgatgatcatttccacgaagcggatctgcgcctccgagtatgtcgtcttgtcgaggaacgccgagaaggcctccgtggcagcggcccggtcgagtcctacgagtgaacggatgaagcgtcccaacccaccctgctgttcggcggcgtggtcgatggcatcgcggtcggcgccggatgcggtcaacaactgctcgagcacggtgatgtcctgacttgtcagcggacgattccgccgcagacgctggagtgcgacattgtcctggtgctcgcgcaggtacgcctgcaccttgtcgcggaagcgatcgatgtccactgaaggggtcatcgtgggaagcggtacatccttggggtcggtgaagatgtcctcgaagtcgacatagaccgggtttcgctgcttcttgtcctggaatcgcaccaggccgcgaatgcgcaggcgcgccagctccagcattggcaaggtgacgtcgacccaccactcgtcgctggccagctcctcgaggcgctcggcttgggcacggatcgccgggatggcggtcttgtccttgaggttgtcggctatcgcctgacctgttgtgcgcacgcggtcgagcgcaacctgatcgttctcgagcacggccagctgcccggtcaacatgagcaggtcgaagcgcttggcctgctcgtcggtatcaatcacggagctgggaaggcccgcaagcgacaaggcctcgttggtgtcgtcgggggtcagcgactcccacgcctgtggcgcggcaaagcgctcaacggcacgacggtggggccggacgatcacattgtccatgctcatgccacccacgaagcggtgcagcgactcggcagtggaggctcgcaggtccggttcggtctgggcgcggtcgagctggccgatcaaccgcaggcgtgattcgaacaacttctgcgtgagcgacttctgggtggcgccgtcggtctcgggcaggtcctggttgaagaattcgaggttgccgcagaaatcgaagacgaagaagtcgtccttgtccttgccgggcccgtacagatccggactcaggcgcgtgccgcgtccgatcatctgccagaacttcgtctttgagtacaccggcttgaagaacaccaggttgaccacttcgggcacgtcgatcccggtgtcgagcatgtcgacgctgatggcgatgtggggtgcggcgtcgggattcgagaagttgtcgatcagatcctgcgcgtagtccaccgaatgggtgatcaccgacgcgaagttgcccgcaaattcgggccagcccgcgtcgaagcgctccttgatgtacatggcatgggcctggctcttggcgaagatgatcgtcttgcccagccggtcgccactggccaccttgtgtccgcgctccatcactgtggcaagcaccttgtccacggtgtcagcgttgaaaaagtacttgttcatctcggcggcgtccacttcatcgggtggaccatcatcgccccagtcgacagagtcccagcgatccttctcggcttcgctgagctcgtcgtagcgggcaccctggcgtaggaacttcgaactgatcgacaccgattgcgccggcaccagatagccgtcagccacggcctcggccagtgaataggcatcagtgggaacgccgggctccagttcgaacagccggtaggtgttgtggtccacctgatccttgggtgtggcggtgagcccgacgagcagggagtcgaaataggcgaagatctcgccgtatttcgcgtacacagaacgatgggcctcgtcgatcaccacgagatcgaagtagccggggccgaaacggcgagcgccatggtcaacctcgttgatgaggttgagcatcgtggggtaggtggacacgtagacgcgtccgtcggtggccttctccgtgagcaggttcaccgtgggcgtgctgggaagatgctgcttgaaggcgctgacggcctggttgaccaacgcggtgcggtcggccaggaagagggcacgcttgacccatccggccttggccagctgatcgatcagggcgatggtcacgcgggtctttcccgaaccggtcgccatcacgagcagcgacgaacgttgcttgtggtcgaggctgtggtcgatggcggcgatcgcacgacgctggtagggacgtcctgcgatgtcgccattgaccggcacgtgggtgagctgctggcgcgcagtgcgccgccggatcgccagggcgagctcatcggcggtgtagaagccgccgacctgacggggcggatagccggccccgtcgtcccagatcgtgtgttggtagccattcgtgtagaagatcacgggtcgctgaccggtcatctgttcgaggctgtcggcgtacagcttcgcctggtgctggccttcctcgggattgcgccgtgtccgcttggcctcgacgagaccgagcggcaggccgtcttcgccccacagcacatagtcgacgaatcccttgcctgaatcgctgggcatgccgaccacggggaattcgcgatcacgggggttgtcgagcgcccatccggcctcatgcagcagcaggtcgatgtaggcgtcgcgggtctcggactccttgtagtcgtgatcatcgggctgggccttggcggcttgggcggccgcgagtttggcgagcaggcgggtgcgttcggcttcaagttctgcgatggcgttgtcgcgagcggcgagttcctcgcggtgacgctcatcggccgcacggaacttgtcgatgagcgctgctgccgcctcacggggcaggggagctgactgagcagcgagcttcgcgtcaaattgcttgcccaccggcacctgatccgggtgggtcgagaagttgtaggcggcccagacgacaacgtggaagagctcgcgcagggcgttgtgtgaggcagtgcgggggatgtcgcggctctcatgcacggcggtgttgccaagcttgcgcagcaggttgagcttccgcacgatcacgtccggcgccttggtgccggtgcggaaggctggctcgttgatgagggtgacgaggtcatcgcggtagggctccgcgaggtcaagcaggaagtagaggtggcgtaccagagtctcgacgctgcggcgggcatagatgcatgccgatcgcgggtcggtgattacatacgactcggcccgtgcacagtcattgtggatctgtggccagtcggccgtgatgaagtcgaagttgcccatcagagttcacctttgaacgctcgggattggagggacgcgaacagctcatcatcgcacgccagggctgcctcgacgcgggaacgctgggcgttgatgtgctcgacacgttcgacgaatgcgcgctggatctcaatcgggggtagcggaagaggggcgcttttcaccgtcgtcgcgctgatcgtatgtagtcccgatgtcgttcgagcggcgcggcggaagtgcgtggctcccctctgggtgttaaaccagatttccgcaaagcggggctcaagacgccgcctgctagcgcgaaaccgaatcaagtggttttggtggacgcattctcgaagctcgccattccacaatgacacacgcccgacttcaaactggctggcatgcccttcaacaaagagaagatcgccggcaatcaaacgtgttcgcgtgatttctctgtctgttgcgcgaagcagcttgatctctgataaatccagatttgaacgttggacattggctactctcaaatatggaacttcaatgggatttgcagctcgcgctcgtgatatttggaggccgccctgaacggttccaacctcctctagtcgcacaatggggtagttggcggagaaatttgaccaaaataggctgccaggaagctctcctagggggttgagctgctggcgacgcttggtgcggatggcgtcggcctggtcaagtattgcggcgatgcggcgctgctcgtcgagtgggggggagggggatgcgaagctccttgatgaagctcgcaggaaccctcctttgtccgccgctacccgtcatgcgaagctggcctgcggtgcggatttcgggtctcctgagaaaatgtagtagatatcgccgatcgatacttttcccatggcgaattacatggaattctgttgatcctactccgatgggatgcgtgagggatgcctcgccgatttttccattttcccaacagggagtgattttggctgctaaaatatcatgattattgaatatggtgtagccttttgaaacgctggagaagctacgtgaatcaaggggcgtggcgacagctgattgcgcatcaagctgggccattccaacgaatgatatttgttctgtcggtgcgatagaatcgctgcgcgggttgattgaggccacctcgctgacttgcactattctcatcccagcatcgccttcaaatcggtcatgccctgcgcgatctcggcgtcgagcgactcaatgtcagcgatgatgtcgagcggcgggcggtgctccacctcgtcgtattcaatctccttgtagcggttgatcgacaagtcgtagtcctgctcggcaatctctgactttggcacgcagaacgactggtcggtgcgggcacggtccttttcgctggtggtgcgctggccccacctctccagaacatcgggaaggtcgctgccctccactggtgagcgcttgtcgtcaagcgagaagccatcggagcgaacgtcgtagaaccagacgtcctcggcgctgcccgactccgtcttggtgaagaacaagatggccgtcgacacgcccgcatagggcttgaagacaccggagggaagcttcaccacggcgtccaactgctgatcctccaccagcatcttgcgcagtgtcttgtgggcctttgagcctccgaagagcacgccgtcaggcacgatcaccgcggcacgtccgccggcctgcaagagcttcaggaacagggccaggaacaacagctccgtcttcttggtcttcaccacctgctgcaggtccttcgaggtcgactcatagtcgagcgagcccgcaaacgggggattggccaacaccagcgaataggagtcctcgtcgtctgcagcgccctccgacaaggagtcgcggtactgaacctcggccccctcaatgccgtgcagcagcatgttcatgctggcgatgcgcaacatcgtggagtcgaaatcgaagccgtggaacatctcgtggtgatagtggtggcgcagttgctggtcggtgagcgcttcggggtggtggccccgcacatactccgaggcgccgatgaggaaaccggccgtgccgcacgcgggatcgcagatcgtgtcggtgggctgcggcgcgaccatgtcgaccatcagcttgatgatgtggcgtggcgtgcggaactgtccattggtgcccgactgcgacagcttcgacagcaggtactcatacaggtcaccgttggtgtcgcggttggccatggggatgtcatcgagcatgtcgacaaccttcgccagcagtgccggagtcgggatggtgaaccgagcgtcgcgcatgtgttgggaataatcggactcagggccgccgagccgctccccgtaggtcttcagaaaggggaacacctgatcggagacctggtcgaacatctgctcggggtcaacctgcttgaactggctccaccgcatgaagtcctggcccggctggaagggggcgttctcaatcgcttctccggtgatgcgtgccttcgactccgcgagagtctggagctcgtcgaggcggcggatgaacagcaggtaggtgatctgctcgatgacctccatcgggttggagatgccgcccgaccagaaggcatcccagacgcggtcgatcttgttcttgaggtcacctgtgatcacaggcgccatcgtaatggcgggcactggcatcaggggaaggactaggcctgcctcaccgcgggcgcatcgcgctgggaggtccccctcagcgccggcggaggcgtgtggtgcgcagccgtttgcgcaccgcattcagtgattgctctcgcagccgacccggcccgcggcgggtgcgccgttgctcagccagccgtgtcgtcgcgagttcggcgatcatgtcccacggcagatgcctgcgcaacaatcccatgcggcggcggtggtctggctcggcggccgcttcgtccacggctgcctgcagctcggcggtgtcggcgcccagggcctcggcgatccagatgagtccataggaactctgcaggcgttggtaggtggtgcgcgccgaacggttgggctcactgcgcgtgtactgccccgagccaagagtggcttgggccgcaaaccatcgcgtcatatgaaggcgttgcgttgaccaccggctgtcgctgccctgtgtctgcgaggcctcgaaggcgtccgagatgggcaggtgtggcggcagtgacctcaggagggctgcgaactccacgacatcgaagtctggtgcaggcatggctggcttccttgatatggcatatggcgctgcggcagggggtgatgatgcgcctcgcggttccaccattgtcgtggcagtggcctcgtgtcgcagataaacggaggattgaggagagaagaccggaacccgtgccgcggaactgtcaacccgggagcggtcggggtgccatcaccacgacacaatcaatggcgccagctcgggcggggatggcccttgaagaagcgatggctgacgacatcgtcgggtcggatctcccacagcaccgcttgggtgaagcgacgagggttcacggtcaggcatcggcgccatgaccgacgcttggctctctccacgtaggttcgttcgcgatgactcagggaactggtcgggcgatcctcatcaaagggcgggttcccgggcccccagaacgagtcattcaaggggccatgccagccgtccatgtcggacagcaacacacgtgtcacatccacacgcaattcgagcatgacgccgggctcgaactgccgcaggctccgcaggtcgggcttgccaattcccaatggccccagtgaccagtaggcccacaccggccaacgcagcgaggggtcgggacggggatcgcggtggtcgagtcgttcggccatccagtcataggcacgggcaaactgcgcacgcaggtcttgggggaagtcggcggtgggcccctcctccacggcaggccaacagtgttcctcgcgtggccggtagacctcgcccgatttcagcgtctgccatacgctgcgatgctgcatcgaccacaaggtgatcggtgaggggagcgttccgtgcagctggatctccatgcttgccgagcataaggacgaccactgacatttcgagtccggcgctgtgcggacgggatcgccccggggtcgtcgtccggggaagacgccccccgaccatctagggaatgcgctcctgatcacccagaggtggtcaccctgcgcaatcaaacccgcccccaccacatcacccctagtcagcgcccacttccgggcctgctaactgtacttccccgggaggttgtgaacgggtggggtagcgaagacctccgggcaggatgtgggttaccacactcactctcctgaccacggaggtcttcgtgactcacgctaacgcacccttgacaccggaagggcgtcgtcgtcttgctgttctcgtcgtggaacagggctggtcgttgcggcgggcggcggaacggttccagtgctcgcccgcgacggtgaagcggtgggccgacaggtaccgggcagggctgccgttgatcgaccgtagttcgaggcccacctcgtcaccgaaccggctttcgcgtaagacggagcatcggatcgtcgcgttgcggttcactcgccggtggggtccgcaccggatcgcgtatcacctgcggttgcaccgttccacggtcggtcgggtgctcgcccgatacaagatgccgaagctgatcaacatcgaccaggccaccgggctgccggttcgccgcccgaagccgacacggtacgaggtcgccgcgccgggccagctcgtgcacgtagatatcaagaaacaaggccggatccccgacggcggcgggtggcgtgcccacggtcgcggatccatgcaggaccgtcacgcgggagtggcccgcgacaaggcagcccgtgccggggcagccggctctcgcggctaccggtatctgcaccacgccgtggacgaccactcccggatcgcgtactcagagatccttgacgacgagcgcaaagagaccgcagcggggttctggacccgcgcgaacgcgttcttcgcaggcctgggcgtcacagtcaccgcggtgatgaccgacaacggttcctgctaccggtcaggcgccttcgctgacgcgctcggcgacgaggtgaagcacaagtggacccggccataccggccgcagaccaacggcaaggtcgagcggttcaaccggaccctcgccgtcgagtgggcctacgcgaagccctacgccagcgaagccgagcgcgccgcagcctacgagacctggctccatcactacaatcaccacagaccccacaccgggatcggcggccagactccctcagcccgcgttcacaacgtcacggggaagtacagctaactggccaaaggcctgcacctgtgccatgctggttagtggcccggcgctgcccggccactctccgggaagcccgtcgtgtgtgctgggcctcctgttccacaggccatgtcaccccgctggccgccctgtcaggccgtagccgcggccgccgatgtcgaggccatatccaagtggccggaccgcccgtcgccgggtgctgtgaaaggtggtgattgtgatggacccctccagtagtcagcctccgagtctttccatcctcaccaccagccatgcgttgagctgacgccacgggcccgcccgcggccacagcccggcgtgccccgcccggcgcgggccaacagctgcatcaacagcacatgggggacaccatgagcacaccttccactttcattgtggggcgcgacaaccgccgcgacgcctcactgcttgccgacgccgccgtcctggtcgtggtcgccgccctcatgtgggcgctgatccacatggggctgcgcatcgtcgcacccttcgacccgcacgcggtggaacaaaccctggacaccagccccgcccggctgccctcctacgccgcccgctcgctgctgcgcatgttcgtggcgctggctgcgtcgttggtgttcgccttcatctatgccaccgcagccgcccgttcgcgacgcctgtccaaggtgctcatgccgctgctcgacgtgctgcagtcggtgcccatcctgggcttcctgtcggtgacggtcaccttctggatcgccctgttcccgcacagccagctcggcgtggaatgcgcgtcgatcttcgcgatcttcacctcgcaggcatggaacctggcgttctcgctgcactcgtctctgctgggccagagccaggagctcgacgagtcggcccgcctgctgcgcctcacccgctggcagcggttctggaacgtcgacctgcccagcggcatgatcccgctcacctggaatgccatgatgagcttcggtggagggtggttcttcctcactgcctccgagacgatcgtggtggacaatcacacctatgtgctgcccggcatcggcagctacgtggccgccgcgtccgaggcccagcagatgccccgcctgttcctggccatcgctgtgatgatcgccatggtgctggtggtcaacttcttcttctggcgccccgtcaccgcctgggtcgagcgtttccgcgtcggcgacaccagcaacgcccaggccccccgcagcctggtgctcaatgtgttgcgccagtcgcacatcgccgaagcctggtcgacgctgtggcgtccggtcggcgagttcttcgatcgcatcacccgcatcttcggcatcgggggagtgcgcttcgtcgaccacggcacgcgccgacgtgccggcgacatcgccttcttcgccgtggtcggcatcgtctgcctgctgggcgcctggcaggtggtgggctatgtgcagtccggccccggcatgggcgaattcggcgaggccttcctgctcggcctggccacgctggcccgcgtggtcgccgtgctcatcctgggcaccgtgatctgggtgccggtgggtgtgtggatcggcatgaacccgcgctgggcgcgcctcatgcaaccggtggtgcaggtgctggcgagcttcccggccaacttcctgttccccttcttcacgctgttcctcatcgccacccacatctcgctggacgtcggcggcatcctgctcatggcactcggctcacagtggtacatcctgttcaacgtgatcgccggcgcctcggccatcccgaacgacctgcgcgaagccgccaccagcctgcagctgagccgctcgctgcggtggcgcaccctgatcctgccgggcatcttcccggcctgggtcaccggcgccatcaccgcggccggcggcgcctggaatgcgtcgatcgtctccgagatcgtcagctacggccacgacaccctgcaggccaccgggttgggtgcctacatcgccaatgccaccaccagcggcgacttccaccgcgtgctcatcggcgtgatcgtcatgagcatctacgtggtgggcctcaaccggctgttctggcaacgcctcaaccacgtggccgaacgacgctatgcgctcacctaggccggtccgcacacctgtcgctgccgcacacccggcaccttccccgctcctcaactttccacgcttcgtaactctccccagcaggaggttcacatgaacaccgaaaccaccaacatcatcgaggtgaccaacgtcaccaagcgcttcccggccaccgagggcggcgaattcaccgtgctcgacaaggtcaacctcaccctgggtgccggcgagatcgtcgcgatcctgggacgctcggggtcgggcaagtccaccctgttgcgctgcatggccgggctcatcgcccccaccgccggcaccgtcgcctaccgcggcaagccgctcaccggcgccaacccgggcgtcggcatggtcttccagtcgttcggcctgatgccctggctcacagtgcaggacaacgtggaactcgggctgcgcgcccgcggcgtcgccccccaccagcgcgccgaccaggcgctgaaggccatcgacgtgatcggcctggacggcttcgagaccgcattcccccgcgagctgtcgggcggcatgcgccagcgcgtcggcttcgcacgcgccctggtcaccgagcccgatgccctgctgatggacgagcccttctcggccctcgacgtgctcaccgccgagaacctgcgccgcgaggtgatcaacctgtggtcgcgtgacgacttccccacccgcaccatctgcatcgtcacccacaacatcgaggaggccgtgcagatggccgaccgcgtggtggtgctcggctcgaaccctggccacatccgctacgaggccaccatcgacatggcccgcccgcgcgaccgccactccgagcagttcggaagctacgtcgaccggctctaccaggcgctcaccggcaaggagcccgccccggtggcacgcgccgccacccccgccggatcgccgctgccgaacgcctcggtgggtggcatggccggactcatcgaactggtgggacgctacgccgacggccgcgacctggccgacctggccagcgacctgtcgttcgaggtggacgacctgctgccgctcgtcgacggcgccgtgatgctgggactcatggaggtggacgacggccacgccgtgctcaccgacgacggcaagcggtggaacaccggcgacatcgatgccaacaagcacctgttcggccacctcgccgagcagcgcgcgcccctggtgcgcaccatctgcaccggcctggacaagtccgacgacggctcgctgcgcgtcgacttcttccgcgacctgctgcagcgctccttccccgcccaggacctgcgcgcccagctcgacacggcgatcgactggggacgctacggcgaattgttcgacatggattccaccggtgaggaattgatccgcaccaaggaactggcggcaaatgagggaccggcacaggggcggatggcgcacgccgaatagccccatgacagcgggcgatgcgcgtcggcaccggctccactcggcggggccggtgcccgggcgcaccagtgccgcgtgctaatctcctgcaagatcatcaccttggtggaccgcccgcatgccacgcgtgatgctgtccacttttctcgtcgatgggccacgggagggacagccggccgaaatgtggctgcacgtgttcgttgtccggatcggattggctatgagcaccacccccaggctgcgtatcaccggcctgtgcctgcttgcctgcctgctgttctccgcattgttgttgctgcccctgcaggcgcgcgccgaccccaccccgggccagacctggaccgatggggcctgcaagaaggacgccggcatcaccctcgtggtcgacttcaacgagaagaacaaggaccactggcccgagggcacccaggacggacgcatcacgcggtgcatcaacccggcgtcggcctacaaggatgccttcaacgagaccaagcagcagaccaccgcgatcctcaaggccgccggcttcgccaatgaggccggccaggacggcacgatcacgacgctggattccattggcgtgaccggcgacgacaagtgggtgccgtcggccgacaaccaggagccgacgcgggcctggaaggaggagccgaagcttgatcccaacgccgacaacaacggacgcttcttcggcttcgcgatcggcaccgacaacaaggccttccccggtggggacctgaaatatgccgacgacccgacctcgcccaccccggcgcccgacccgggcaccgatcagggccagggcggtggccagggcggtggcgacgcagccaacacgggcaataccaacaccgggaacaccggtggcgggggcgtggtggccggcaactcgaacaacaattcccggggcacctcgaacttcgtgccgcgtaccttcccccgctccaccgggcgcgtgaccaccaatccgacgacccgatggggtggcgccggggcaggctcgtcgagcaacccgtcggccagcccgagcccctcgtcgtcgtccagctcgtcggcggtgtggggcagtgacgcgacgcccgaggccgctgcgcacaatggcaattcgccggcacgcctgtggctgctcggcagcattggcgcgctcgccctgggcgtgatcgtctggggctcagtgatgctgtaccgcatgcgtgacggcggcaagggcaagggcggtgcgccggcgcgcagcgcggacgaggccggtggccccggtggcggcgaggccagtgccgacgcccccgctgagggcgctgacgccggcgccgagggtgccggaaccgatgccgagactgctgacggcgtgaccacggacgctgctgcgggttcggctgcagtttcaggggcgaccggggattcggccgattccggtcagggcacggccggcgccgagggaggcgcgggcgatgaatcggtgccggacaatgaggtgacccgtcccaatccggtggtccgcgatgccccggccagcccgcgcgacatctgggggccgccggagacgccgtcgggcggtgcggatcgcgcataggcccctggcacacagaatccctgccctgcagaggcccctgtcatggaggggcccccataccgtctcatcgggtgtgaggaattggggatggttatgccgcaggggatgtggatgtcactccgctgatgccggagatgagcgcctggccatgccggccgcctgagccggccgagtggtgacgcggtcgagcactgaacggccacgtgaaggaagggtcgggacacggatggtttccgtgtcccgacccttcctcgtgcctgtgcagcagctagccagatcctgcgatcagctggcgtgcttcatgcgatagatgaaggtgatcatcgcgtcgcgggcgatcggcgtcaccggacggaacgtctggtcgggccaaccggtggagatgccgttggctgacagccacgacatctcggtgtagaactggctgccgggcgtcacgtcagcgaacggcgaggcagccggggcctggaatcccgagacctgcgagtagcggtacaggaaggccgccattgcgtcgcggttcacattgtccagtggccggaaactgccgtcgggccagccggtggtgatgttctgcgaggcgagccagcagatctccttgtagaactggttcgacgggttgacgtcggtgaacggcgaggtggccggggcggtgtagctcggcgatccactcaggcggtagaggaacgccgccattgcgtcgcggtgcgtggtgtcgagcggacggaacgacgccgtgccatcggcgttcttccagccggtggtcacattgttggcggccgcccactggatctcggtgaagtacatgttgctcggggcaacatcggtgaaggcctgggtgaccgggggcgtgacaacgccgccgccacccgttgagccaccgccggtgctaccgccaccaccagtcgatccgccgcccgtgcccggatccgtcgtgccaccgccggtgcccgggtcattcttctggccggccgaagcggtcaggtagccgtgcatcgtgaggccctggagggcctggatggtggccatcgcattgtcgttggtgcccttgagtgtgttcgagaaggcgccactgggcagctggcgaccgatcaggaagtccatctgcttgctgacgtcgatcttggggtcgttcacgtcgccgatggccatgagcatcatgcccgcagtgttggtgggcgagtagttggtccagtagcttccggtgtcatcggtggtgaggttggccgggtcctgggcccaggcgaccgccttggcgagcgagtcggctgccctggggttgcccttggcgacggccgcggtggccatcatgccgatcgcggtgttgtcgccatcgcccgtgtcgccgccccagccgaagccgcccttgctgttttgcttgtccactgtcgcatcgatcagtgcctcgggcacggtctccccggcgcgggtgagagccaccatcgacaactgcggtccccatgccccgccgccaccgggattctccgcgttcagtgccttcaactggcccaccaggtcattccccccaaaggcactcggtttctgatgggcggcaatgacagtgatgatgatcttggcggtagcgcccgcattgtccttcgtgtagctggccacctgcggtgccaaattcgtcatcatggtggagatctcgtcggcatatttcgcgtcaccggtggatgacagggccaggatcacatcggccaggccgccgttcgagcagctataacttgtctgcttgtcgccaagacaattggtgttgtaatcattcaccagccaatcggctgccttggtgatggcatccttgggggccggtgcggtgtcggctgacgccggaaccgcgccggcgagcggggtgatggtgagggcaagccccagcgccatcccggtcaggctcttcctgacggacatgaagggaaacctttcgtgggtcgtccacgatgacggaccgcacgggcttccgggagccgaagggggcatcggagctgagctggcgtccatccgtggacctcgacggataacaaagacgcagccttgccaccaggcattccggctggacgcgacaagtcgcgcttcacggttgcgggtcagcttcgggttcgcaccgaattcccctgagtgaaagggctacaagcggtgacactagcagcctgtgacggacctgtgttccggtgggagtgatttcgtcccgagttgcgacatcagctgggcccctgcggcgaatccccttgccgcaggcatgggacgagggcgcgatcaggtcggcaaggggtgaatctcgcggtctcccggaccggtactgcaggaggcggagatggccccggaccgcgcacggctgcgtgctaggatcctgccagatcatcacttcggtggggaagccggtccaagtccggcgctgacccgcaaccgtaggcacgccgccacatggcgctgtgcaagccggaatgccgcccgcgtgatgctgtccagttttctcgtcgatggactacgggagcggcagccggctgatcgtggtcggacgcattcgttgtccggatcggattggctatgagtgccgtccccaggcctcgggtgcgggccctgtggctcacgctgctgctcttcgtgggcgcctcgctggcccttcccatcgccgcgcgcgccgaccccacgcccggtcagacctggaccgatggctggtgcgtcagggggcagggcgtcgcggttgtcgtggattatcacacggcagacaaaaattcgtggccggcaggtgaccgtggtggctggcaagtacattgcatcaatcccgcgtccgcctattctgacgcacttgcaacgtccagttctgcacaagttggctttctcagggcggccggtttccactttgtggacaataacggtttcgtgacgtcgatcatgggtattcccgccaatggatccaatttctggtccttctccacggacgacgcggccggttcgccagcatggcgtcgggcgttccccttggacgcgggcaccgatctgaacgggcgcttcgtgggagccgcgatcgcggggcagaacgccgtgttccccatcacgccacccgagtacgccgaccccgcaccgaatcccgatccggcgcccgccccggaacaggatgccgccgccaacgacgccggatcgaacaaccagcgacccgcggcagcgaaccaacagccacgggccaacaatccggttgccaacagcccagttggcaacagcagggtggccaacaatcccgccgtccgggcggcctccgcgcggcccagtgcgtccgccagcaacgcggcgactccacgggcctcctcatcgcccagcccctcggtagtgtggggtggtgacgcgacccccgaggacgccccgcgtcagggcaactccccggcgcgattgtggttgctggggggcatcggggcggttgccttgggcgtgatcatctgggggtccgtgatgctctatcgaatgcgcagggtcgactccggcgacccctcgggagccctcaacggcatcggcgccgatgccgggctggacgccgactcgcagcccgggacaccgggacctgacggcgtaattcccgacggcccagccgggttcgcccccggcgacgaccaacaatccccatggtgagcagcatctggccccgcgccgccgcactgggtgccgccctggccctcatgaccccggcagtggccctggccgatggggccgacgccaccgccctgtgcgcccaggccgaccatccctgctcggtgcgcatcgatcccgtggtgcgcgaggcggccggataccccgtcacggtggcgggggccacccatacggccaccgcgctgcaggcctaccgggtgctgctcgatggtgaccggatcgcggctctcgagccctacggcgaccccctgcccgtgtcactcaacgccgccggcatcgcgcaggcgaacctggtgatgcccaagcttcccgcgcaggacgccgggggctatgtgctcgtcgggctggccggcgagcgcggcacggatgtgtcatccatggtgggctccttcactgtcctgggcgcctcccgcccgaccctgctgggcgacggctacggcgaccagaaacccgtcggccaggtgctcgacctgcagtactacgcggccgttcccggcacccggtacaccgtcgacatgcaggacgacacgggctcctggtccgacctgagcgcgcccggacaacccggcgacatcgccgcgtcgcccgacgcggtcgggcacctgcgctacgccctgccacgcggactcgcgtcgaagcaatacgccttccgactacgcaatacgacgctcggcgaggtggtcgccgactggcgtgccacgccgtcgctgtcgccggttgcgcagtcccgcaccaccgtgtggacgcctccgccggtgggcaacaagatcggcaacagtgccacccgccatgcccaccgcaccggcccgacgaagctcgccgccgcagtgatcgtggtgatctgcctgcccatcaccctgctccccggcatgcgcgccgcgcgccgacgtcgccacctggcccggcttgcgctgacccctgccacagcgccccggcttggggtgcccaccgccggggcatcagtcaccgccgcggaggacgggcgatgacgcaggtgcatccggtgaccgccttcctcgccgtggcgtcgctggtcgccgtggcgatcgccggcgccaatccgctcatcatggcgctcgccgtcgtcgccctggcgctgctgtcgtccctggccgccgggccgcgccgggcgtgcttcgtcgacgccgccctgacggcgatcgtcgtggtggccatctggctcgcgttcgccgtgctggtcgatcaatcggacacccgcggtgccgtggtgttgacattgccgcgcaggcaactcggtgcgggcgtggccatcggcggcgtcaagaccgtcacctggctggaacagatggccctgcgcggggtcggtgccggactcgtcgtgctcggcctgggcctgctggcccaactgcggcccgcccgcacctggctgaacaccatctcgatgctgttcggacgatggaccgacctcgtggcgcccctggtctgcctccccgaggccgtgctcgccacccggcgactggacgccccggcgcgtcgcctcgcccggtcggcgcgtgccgcgcgcacccacctgcgtcccgagcaactggtcaacgccctggccggggccgagcacctggcgcaggcgtggcgcgacgaccatccccgcgtgggggccggcccgtcgggtgcggccggcgctcggtggcgcggcggcatggcagtgctcggtggttggctcgtggtggcgattccactggtgatgctcatcggtggtccccggctgccgattgccctggttgcggcgctcatcgcctggggcgtcggctcctgcgtggtgcacgtgcgctcgcagcgtgcggtgccgctgtcagccgccgactggcccctgctcggtgcctgcctgctgttgggcggcgcctggtgggcccgcaatgtcaccggcgatgcggccgcattgggcgtggcgcccggcggctggcccggccttccgctggccctcacggcggggatggcgctggtggtgcttgctgcagtggtcgtggaggtgcgcgggcgtgcccgccgggcaggggcgcaccatgcgtgagtccgccacgcctccccgccgtgcacatcgcccgcagacagatgccgcccccgaacagcacgctcccgggcggcacgagttcgggtaccacgacccctcccggcccgatcgggcgcacccggacgcatcccggcacgccggcctgcagctgcggcagctggcgatcacccgacccgacggcgcagtgactctgagcccagggtccccgggcccggtgaccctggacccagtggccccgggtgcagccgacctgaccttccgacgaggcgccatcaccctgctcaccggcctgagcggggccggaacgaccgcgctgtgccgctcagtcgccggcaccctgccccacggctggcggctggccggggacatccgactggccgggacgcaggggcccgcggtgtcgctgcggggactgtccgcccgggacaccgcgccggtggtcggctcggcgatcgccgatgacatccgggagcaggtcgtgctgcgtcccgccggactcgaaaccgtccgtgaggtgatggttgcgcggtcgcgggcatgcgccggggtcgccgggacgcgtcatggcgccgatgaggcagccgacgccatgatcagccagctgggacttgccgcggttgccgaccgtccggcgtggggactggcccaggcctcccggtgggctctggcggcaggcgctgccgtggtgggatccccggccgtggtggtgctggacagcctgttgggtgtgctcggccacaccgctgccgcggggcttgcccgggcggtcaccgcgttggccgcccgcggcgccacggtgatctggagcgagcaccgcctggccccggtggccgcgattgccgatgatgtcgtcgagctcgctggccacgacgcgtaccgatcgccgatcggcgcctggcagccacgcgcacagccgcggccggccctcatggccctggtcgatgggctgggcctggaccatgacctgtggaccagccccgagcgcatcaaccgggaactcgccccccgggtgcgcaccgccttcccatccgccggtgcgtcgcgtcgcacgccggttgctcccgcccacccggccgtgcgggtggatgccgcccagctggggctgcggggaccctcgctcgagttcaacgccggggagcacgtcggcgtgctgtgcgcgacccccgatgaggcccgcatgctcgagggacgcctggcccgtgcgctgggtgcaccgcgcagggtcgatgcgcagtcgttgctgcgacgccgaccgatggcccgggcctgcgcggcgtgggacgaactgcaccccggctcgcagacgatggccctgttcgcccacctgctgggcgccgcaacgcggctaccggccgggccactgcgggtcgccagcatgtccggcggccaacgggacgccgccaccacggccatggcactggccggaaccggaccggccgtgctggctgaccccggcgccaccatggacgccgcgatgatcggccggctcgccgaccacctcgccgccgattcacccctcacgggactggccaccacccagccccgggcccgcgccgtggtgttcgtgggcgacaatcctgatgtgatggcccaactgtgcgagcgcacgatcgaggtgcgccacggcgcgatcgtgcaggatgtcggcgttctcgcagcgcaggccgagccccgcacccgcgccacgctggcccgggcctgtgccccgctgcgcgtcgtgcaggtgtccgacgcacttgtcgccctcagcgggacgacgccgggtggacccctcgtcgagcaggcggagccgggtgccacggcgtccgtgcgcccgggggtggacctggcatgaccgtgggtgtgggaaccggaaccggccggctggcgtcggcgcacgtcgtgggtgccatgaccggctggcgttcgcgggtgatgaccgccgcgatggtggtgatcggcctgggctggctggtctggccgctcgtcgattcgctgtcggcaccctcgcgccgccaggtcaacgacgaggccccctgggtgttggcggccgccctggcgatggccgtggcgctggccaccaccttgtggcgcgacagcggtcgcagcgctcgcgtgatgggcgtgctcggctccctggtgatcgtgaactgccttgtcagggcgctgatcacgccacgtctcatgggcatcgaaccggtctatgtggtgccgctggtggcggggatcgccttcggcgggcctgccggaatgctcgtgggggtctggtcgtgtgcggcgtcgtcggcgctgatcgactccgtctccacggccctgccggcgcagatgctggtctggggctgcacggggctgctcggggccctgctcacccgtacccgccatgtcgccgcctggctgtggggcatcgtcgtgggattcgcgggcggcccggttgccggcctgttcctcaacctcaccggctggcccaccgacaccgtgcccggcgacgtcggattcctcatcggcctcggaccggcacagaacggcctgcgcctgctgcggtacacggcacagacctcgctggcctatgactgcatgcgcgggctcaccaccgcgctcggcatggcgttggtcgggcttccgctgatcatcgccctgcgccgcgtgtggggcgtgcatgcacccgccgtctcggagggactgaggcacctgcccggctcgcaggtgagtcgggacgcgctgaggcgacgccggcgcgccgcacgggtgaacgacctgtggcgacgtcgacagcccgatgacgccgaccagtccgatgacaccgggcagtcccatggcgccgaccagttccaggacgccgaccagtcccatggcgccgaacggcccgacgccaccgcgtccgagcctacgaactccccacccggcaatcccgtcacgcaggaaggttgacatgacgcaagccgcacagtcgccccttgaggggcccaccagcaaggcacccgatggcaaggatccgacgacggcagggcccgcgcccgacgccccgccggcggctccccgccgcaccgacgccgcgggcgcgtccgcacggcgcaccctcgacagcgccgaactcgcccgcgccaccgagctgttgggcgcgatgacccgcgccttcgagcgtcgcgtcgtgggccaggacaggctgctcaccgccctgcaggtggccctcatgtccggcggccatgtgctgctcgaatcggtgccggggctggccaagacgctggccgcctcgacgctggcgtccaccatcgacggcagcttctcccgcatccagtgcacgcccgacctgctgcccttcgacatcatcggcacccagatctacgacgcgcgcaccggcgggttcaccacccagctcggccccgtgcacgccaacatcgtgctgctcgacgaggtgaaccgctccagcgcgaagacgcagtcggccatgctcgaggcgatgcaggaacgccagaccaccatcggcgacaccagctatccgctgcccgacccgttcatggtgctggccacccagaaccccattgaggaggagggcacctatgtgctgccgcacgcgcagatggaccgcttcctgctcaaggaggtgatcgactatcccagcgccgacgccgaactcgaggtgctcgatcgcctggacgacggccggctggacgcaccctccgcgccgccggtgatgaccaccgaccaggtgctggaactccaggcgctcacccggcgcgtctatatcgacgagcgactcaagcgatacatcgtcgaagtggtgaacgtcactcgtgacgctccccacttcctgggatcggatatcgcccgctatatcgattacgggtcgagcccccgtggctcactggccttcctcgaggcggccaaggccggtgcgctgctggccggacgcgaccatgtgctgcccgaggacatcaaggcgatgcgccatcccgtgctgcgccaccgcatcgttctcaccttcgaggcgatcgccgagcaggtgcaccccgagaccatcatcgacgcggtgttcgacgccgtgcccacgccctgacgccatggcactgctcacacgcatcaagaccagcctgaccatccccgcccaacgccgggtggccgggctgctcgatggcgcctacgcgtcgatccacgccggacgcagcctcgacttcgccgacctgcgcgcctatgtgcccggtgacgacgtgaaggacatcgactggaacgccactgctcgcggcgacgaggtgctggtgaagcgctatgtgggcgaccgcaagcacacgatcatggtggtggtcgacaccggacgcgagatggccggcacggccgccatcgccccgacccgcctgccgggggagggggcccacgcgtggacgggggcgtcggctcccgttgtggccgcacccgggaacggcaaccgggggaaggccaccacgaggtcggggaccagcgagtcagtcgctcctgtgcccatggtcagcgaatcggtcgctgacgtggccatcaccgtggccgggctgctcggatggctcgcggtgggccacggcgactacgtcagcatcgcgtcgatgggcgccgacggccccttcctcccccgtcccacgctgcgcgagaccgagctggaacgcatgctcgtggccgtgcaggaatccagtacgccggggtcgccgccggcccgcttcgacgaactggtgcgcacgatgatcaccgccacccggcgtcgcaccgtcatgttcctggtcaccgccgacgtcatgccgggccatgccgcattggcgtccatgcgacgcctcgccgcgcagcaccagctggtgcacatcgcgatcggcgaactcgaccccggggccgcggcgcgtgccggtcgggaactgcgtgacgtcgacagtggcctcgggttgccctccttcgtggggcacgacgacgtactggcccgcgaattcgcccggcaggccgaacgtcgccacgccgaacgggcccgcgcactggagcagatcggcgtgccgcatgccgagatctccccggacgacgtggtgatcacccaggtgctgtcggtgttggagaggatgcgccatgtatccactcgctgagctgctggtgctggccgatccggcggtggtgggcccccgggtggccctgatccggatgctcccgctcgacatcaacccgccggtgcgccacagcggatggctgtacctggtggcgctcaccctggcagtggtggccgtcgtcggcggctgggcactgcgccgactggcccgccggtgggcccgcgaggacgcgtcacgcaccccggacagcctcgacaggctgcgcgcacggacgctgcaacagatcgaccacgtggagaccggccaccgcgccggcgccctgggcgacagggccgtgcaccagcagctgtcggcgatcgtgcgccgcttcgtcggcatcgccagcggtggcgacgctgacttccagaccctggccgagctggaacgggccgccctggacaacccggcgctggagccggcggcgcagttcgtggcgtccggctatgccgcgagcttttcggcccccggcccggcgatgccgtcggaggacgcgtccaccggtgggactccgcgtgagcaggcaagctcccccgaacgggccacggtccccggcgccgatgaggccatccaccaggcgcgcgaggtggtcgtgcaatgggcgtgatgtggtggtggctcggcgccgcggtgctggtggcgctggtcggcgtgggcctcctgcggctgctggggcgctcacggcgtcgcggccaggacgagagcgccctgtggcttgcgcacgccgaacggctgcgcgccctgccgcgcttccggcaactggcggcggcccgggcgcgctgggcccgcatcggactggtcgggctggcgctggccgcactgggcaccgggttgctcgccgcccgggtgatccgggtgtccaatgacgacgaactcatgcgcaaccgcgatgtgatgctctgcctggacgtgtcaccgtccatggagggcatcgatgtgccggtcgtcgacacctaccagcgcctcagccaacgcctcgacagcgagcgcatcgggctggtcgccttcgactcgggcgcggtcaccctgttcccgctgaccagcgacgccggcttcgtgcaggcccggctgaccgacgcgggcaggcaggtggccgacctcgagcgcaatcccattgccggcacccgcgtcggcgattccggatcgtcgctggtgggcgacgggctcaccagctgcgtgcggcgcttcgaccaactcgaccagccgcgatcgcgcacgatcgtgctcgccaccgacggactggtgtcgggcaatgcgatctactcgatccagcaggccgcggaagctgcccgcgacaagcaggtgatggtcttcgtggtggcgcccgacaatgacgacgcggaagcactcaccaccctgcgcaacgccgcccacaccaccggcggcgaggtgctgaccgtgcaggccggccaacccgccaacacccaggtgatcgcccaggcggtcgaggcgcagcagcgtgccgcgatcctgtcccacaccaccaacaggtcgttcgaccggcccggattcggcgccggactggtgtgcctggggctggcgatcgtgacgatcagcgaggtgcgccgtcccggggtcgcgcgcggtgcgcggggaggacgccgatgagcttccaaccgatctggtgggtgatcgtcgccggcctggccctgaccggcgtcaccgtggcgctcgtgcgcgccgatcgtggggcacctgcgcgggaggcccgggtggcccaccgctgggtgcgcctggcgatctgcctgctcgtggtgctcatcggggtgcacccggtgatcgggcgcaccagcccgccgaagccggccccggcgggcgccgacgtggtggtgctcatcgaccgcaccacgtccatgggcgccgaggactacgacggcaaccagccgcgcatcgcgggcgtcgcctccgacgtggcccagctggtctccgaccatccgggtgcccgcttcgcggtgatcgccatggacaacgacgcccgcgtggaggtgcccttcaccaccgatggccaggcggtggccagctacgccgccgcgatcggatggcgtgagaacccgcgcggcaccgggagcgacatctccgtgggcgtcgaccaggcccggcaactgctcgatgcgtcccgggccgagcgtcccggcgcgcagcgactgttcgtctactgcggcgacggggagcagacgatcgaccaacctccgcgctccttcgcgtcgctggccggcgacctggatgatgcgctcgtgctcggctatggcaccagtgccggggcgccgatgcagacctacccgggctcgggcgactatgtgagctatcagggctcgcgggccgtctcgcacctcgacgaggcgaccctgcaggcgattgcggcgcagaccggcggccactacgaccatcgcaccgcgccaggcccgctgcccgccacggggttggcggccagtgcctccgccgcgcacaccgaacctggacgcaccgtggaggtctactgggtgttcgcgttggtgctggccgggctgttgggcgtcgagacctggagcgcggtgggtcgctaccgccgggtgcgcgcgcaaatggcggaccgcgcgcccgggcctcacgctggacggggggagcgggcatgagcgcgcgtacgggtggcactgcgcgaaggactggcactgcacagaagggcggacccaccccgaagggccggcgtcgccgccggacgttggtggtggcgtgttggctggtggtcgtcgtgttgggcctggcggcgttgcgcatcggcgggctcatggttgacgagtcccgtgccatggaccattacgaccacaaggactatgtcgcggcgcgctcgggctttgcccgcacgacggtgctcaacccgttcaacccctggatcggccatttcaacgctggcacggccgactaccggctcggtgacttcgtggccgccggcactgatttctcgaaggccctgacgcttgccccgccggccgacaagtgcatggtcgggctcaacctggcgtggtcgtgggaggcgctgggcgacatgcagcgcgacggcggccacaccgaccaggcccaggaatcgctgaaccgggccaagcagatcgtggtggcgctgaactgttcccagcagcccagcccgggatcctcgtccggcgcacagccgtcggggtcgtcgcaggcgtccgcgtcgtcctcgccggcatcggccagcccatccgtgcagccctcggggtcgtcggcaccctcgtcgagtgcgtccgggcaggaccagggcgacgcaagcaccgcccggggtcagcaggagcagaccgagcagcgcgtgcagtcgaagatcgaccgcttgcagcagtccagcgcgtccagcgcgcccgacgaggccacccagcaggagcagctgcagcgccgtgagcaggaggcgcaggtcgccaaccagcaacagggtgacaacggggcgaatccgacgacacagccgacccgcaggagctggtgaccccggcgcgggagtcggcgatcagctggttcggcgacgggcccgcgcgggcttgccgcgacgtcgcctcacgaccacggcgacgccgatcatcgccaccacgaggccgcccgcggcgatcgtcgccacgggggactgcccgcccggtgacaccgatgccagggtggtgaccgccggcgtcgccccctgcggattggccaccgaaccgtcggcgcgcgtcacacgcaacgccggtggcgtgcagtgggactggtcagagtcggcatcgcgggtgtagcaccaggcctcgatggacccggcagttggctggaaggaatcggcgccgagctgcgagtagtcgtagctggcccatccggtggcgtcggtggcgtggaagtaggtccagtagtcgcggttgccggtggtgcagccggcgggcgtgtcggcgagcgaacagatgagtccgcccttgcccttgcgcacgctgaccccgccgacgcccagtgcctcggtgcccgatgaggggttgccgacgcactggttcgacacgacggcgtcctggtagctgacgaacagccagacgcgtcccgagccgaggcagtcgccgatgctggtgggtgctggtgtggatgcgggcgttgcgtggccgccgtcggcacgtgcggggagggtggtgcccaatccgaggagcatcatggcgagcgcgacgagtgcggcggctgtccggtggacggtgctcgcccctgtgctgcgtggggccgtggtgctgcgtggcatcggggcgttgcgtgaggtcacggtgcgggccgcgtcggtgaccgggccgatggcgtcggtgggggtgcgtgccgcgtgggcggaaccggttcgggtgagcatcgcgtgtgcctctcggcgagcccgtgatggcgatgggctcgtacctctcggtgaggtgcgcgcgctggccgggcacggggtgccggtgacctgtccgtggacctcgacggatatctgacggtttgccacggatcggtactccggctccagcggcggccacggggtgagggcccggggacgtccctgtcacggttgcgggtcagttccggaattgcaccggattccccgagctgtgggcgttcacaggctaacagtcggttgcccgaccggctgtggggacgccccggaaatctgggttgggaggagtccccgggaatcggggtggggaccccgaccgggaccgatggtgccgggtcccggtcctgatgtcaggcatggcaggtgcctgtgcgatgggaccggcgtgatggggccggcgtgggtcgagatggcgcggtgcgcctgtgtgctgcggtgagcgtgtacccgatgcggcgcgcccgatgtgctgtacttgctcgcggcgccggcggcatccagctggtgccggggaactgaccgcgatgatccgggggacacgatggccaagcagcaacccagcgtccacgagcgtgcagccggcgggtcccatggcgacccagccggtctgacgggacccgatccgcaggacacccattcttctgcgcgtggcacttcccctgagcctggcacgcatcgacgtcgccgcggcttccgcatgaagggcgagggcgtcccggcgctcatggccgtggtcgtcgccggagtgctgtccgccgcgatccatggggcgcgcaagggcgcctgaaccaccggttgccggccgtcacccatacgcaacgcgagataggggcggataaagcaccatagacggtgctttatccgcccctatcttctcgtcatgcggcgatccggccgttgggtgggcacctgtgcggcaatgacgccgcacaggtgcccacccaacgaccgaatggcgggtcgtgaccacgtggcggcacctcgtcgaccgcgcccggacacgtcccgtccggcgatgagcatgcagacggacaggtgccccgcacccaacgaaccctcagaacagcgaggtcaccgtctggatcaccaggttgatgttgaggatcgtcagcacgccggtggccagccagcccagcaccgcaacccaccgggggttggcaaagcgcttgcccatgatgcgcttcgagctggtgaaccacaccagcggcaccatcgacagcggcagcgcgatcgacaggaacacctgggtgtcaaccagcagcacgtcgagcatgtgctccgagccgccgaagatgatcgtgaatgccaccaccggaatcaccgcgatcagccgggtgatcacgcgtcgcacccacagcggcacgcgcatgcggatgaagccctccatcaccacctggccactcagggtgccggtgatggtggagttctggcccgacgccagcagcgcgacggcgaacagggtgctgaggatcgggctggcgatcgagccggccagcgtcgggtccttcaacgcggaatacagcgagccgaacgtggacaggtcctgggtggcgccgaagaacagcgccgcacccagcagcaacagcaggcagttcacgatgaatgccgcacttagctgcacattcgagtcccaggtggcgaacttcaccgcgtgcgccttggacgcgtcgtcggcacggtcgtagtcacgcgactgcaccagggccgagtgcaggtagaggttgtggggcatcacggtggcgccgacgatgcccagtgccatggtgagttcggcgggccgcaggatgtcgctggtggggatgaatccttcgaagaccttgggcatattgggcccggccaggtacacctcgtagatgaacacgatcatgatcgtgaggatcagcgtggccacgatcgcttcgatcttgcggaagcccacctgcatgaggaacagcagcaggaacacgtcgagcacggtgagcagcacgccgacgatcatgttgatgccgaacagcaggtgcagggcgatcgccgcgccgatcacctcggcgatgtcggtggccatgatcgccagctcggtgatgatccacagcacgatgcccagccgcctgccgacgtgggcgcgcgtggcctgcgccaggtccatgccggtgacgatgccgagcttcagtgccatgtactgcaacagcatggcgatcaggctcgagatgaggatcaccgacaacagcccgtagccgaactgggagccgccgccgatggaggtgacccagttgccggggtccatgtagccgacggccaccagggcgccgggccccgagaagcttgccagcgaacgccagaacccggtgccgggcgggggcgtcttgatggtgccgttgatctcttccagcgacagcccgttggtgggacgcaccaagccatggatgcggctgggtcgtcctcgctcgggggcctggtcgggacgctcttctgattcggtcatcgcactcgacattcgtcgtcttccactgtctcgaaccccactgccggtcgtgcccggatgctcctgcgccgggtcggcccggttgcggaggcggcgtcgccgaacccggtgtccggacgacccaaggtcgtctgaacccagtgttcaactgggcctcagtctagagttcgggtatccgaaatcacaagttccccacacaggagaattcactcgcggcgtgacataatgacgccgtgaccaccgacttccatcccacctcagcgcaggaacagtgcctgaaggtgatctgggggctcggcgagcacgacgacgatccggtgaccgtcagccggctggcgaaggccctcgaccagagcaattcggcggtctcggagatggtcaagcgcctcgacgaggccggcaccgtgcgccacgagcgctacggcgccatccacctgacgcccaagggacgccgggtggcggtgggcatggtgcgtcgccaccgcctgctggagaccttcctcaccgccgtgctcggctacccgtgggacgaggtgcatggcgaggccgatgcgctggaacatgcggtgtcgaacacgctggtcgaccgcatcgacgcacacttgggccatcccacccatgatccgcacggtgatccgattccggccgccgacggcaccttggccgacaccggaaccacccggttgaccgacctcgcccccggcgtggcggcgcgggtggcgcgggtgaaggacaccgatccgcagttcctgcgcttcctcagcgacaggcacatcaccctgggcacctcactcacccggttgccgggtgagccctattcggccgatgtggtgatgtcgctgcccggccgcgaaccgatcaccatctcggcccggctggctcgcacgatctgggtggagccacaggcatagctgctggcagccgaccgtccggtctgttggcggacgccgattcggttcgggggtgccgaggggtatccgtgtcgacgccccggcgcactcaccccgaggccgtcaatcggtgttggccgcacggacggccggctcagtgctgtgtgttggcgggcaattcctcaccctgcatcgattgcgccttcgacttctcggcgctgtgcaggatgtcatcctccgaaacgggacgcagatggtcccacaacaggaacgccaggccaatgatgaacatggcgacgccggtgtacaggttgatcggaatgccgccggtgagtgccttgtcggcttccgggcgggcgatgcccatgccggtgaccagtacgccgtagaccacgaacagccccccgaggaagcgtcgcaggtcgaagcggcgggtgtcgcggatggcctcgtcgcgctcctgcttggtcaactgcaccgccggcaggtcgccggtggtcagcggctcggccggatgggcgccggtccagggctccttggtcggtgaaccggtgaagggcctcccggcgttctgcccccgggcgtccggtccgggacgcccgggctcggcggcgttggcgtcgtgggtgttatcgatgtcagacatgggaactgtccttcctgcggatcagacgaacgggatgtagagcagcacgcacagcacaagggccgtgaagccgagcactgccggcgagcggtaccaggcatcgtcgccggcgtggttgtcggccttcaggttgatgatgcccacaccgcgcaccagcccgtcgagctgggcgatcggcttcggcttggtgaccaccgagacggccaccgtcaccaccacggcggtgacgaacgaccagatggccccgtacaaggtctcggcggtaccggtggcgtagtcgaaccacgaccaatggttcaggtatccgatccacaccaccatcggggcgatgatgcccgcgatgtatccccacaggccgccggccggactcgcccgcttccagaagatgcccacgatgaacactgcgaacagcggcgcattgaagaaggagaagagcgtttgcatatacgtcatgatgttgccgaattgggcggccaggaatgcagttcccacaccaatcaatacgcccaccgtggtgaccactcggccagcgctcaaataatatcgatcaggcatgttcggcttgatatagcgttcccagatatcataggtgaataccgtgttgaagctcgaaacattggcggccatgccggccatgaacgacgccatcatgccggtgaccgccacgccgagcacaccctgcggaaggtacatctgcatcaacttggggatggcttcgttgtaggtgatcgtgccgtcagcgaacagattgcccacggtggccgccgcgatcatgccgggaattaccacgatgaaggggataaacagcttcgggaaggcgccgatcagcggggtgcgtcgtgcggccgacatgttcttggccgagaaggcacgctgcacctcggtgaagttggtggtccagtatccgaacgccagcacgaagcccaggcccatgacgatggccagccagttcgcgccgatcggattcgtcacatcaccgatcccggtgcccttccatgcatgtgtcatgagcttgccaccggtggtgttggccaatgcctgcgtcaggccaccccatccgcccacgcggtgcatgccgacgacggtcagcggcaccagggcggcgatgatcacgaagaactgcatcacctcgttgtagatggccgacgacagaccgcccagcacgatgtagatcagcacgaacagggccgagatcaccacggccagccattcgggccagccaagcatggcctcgatgatcagcgccatcgcatacaggttgataccagcgatcagcacattcgaggcggcgaatgagatggagttcaccaggtgcgcgcccttgccgaagcggcgcaacatgaactcgggcacgctgcgcaccttcgagccgtagtagaacggcatcatcaccaggccgaggaacaccatggccggtaccgcgccgatcaggtagtagtgcagcgttgccatgccgatctgggcgccgttcgcggccatgcccaggatctccgtggcgccgaggttcgccgagacgaacgccagcccggtgatccaggccggcattgagcgtcccgacaggaagaagtccatcgacgagtgcaccctgcggcgggcggcgaaaccgatcatgagcactgtcgagaaatagatgagcagcatcaggtaatcgaccggtgacaggtcgagccggatcgctgaggccgtgtccagggccagcatgggggtgccttccgtcgagcatttcgccccgcgggtgtggcggtgcagacgatgcacggcctcggggcgccttatctgtcaccccaccaggcgtcagcgacgatggtgacgtgaacattgtgagtatcgtcccgtggccggctctcgcgaggtgatcccacattccgaccctccgcggtggatgggcagctgtggatgcgcatctcggggcccggccggtgtagcgtgtggcgcgtcatcacgggcgccctcagaacgggctgagatcgagctggtctgctcgagcaccgattgcacctgtccgggtaatgccggcgaagggaaaagaagactcatcatggattcatccacaccaaacaacgctcccgccaaccgcgtccgcgccacgcgtgccgtgaaattcggagatttcacgctggaggtcccctatcaggagataaagctccaggacacccccggcggcggcgccaatgcaccattcaccgactattgcacccagggtccggattgtgattccacccaggggctgccaccgatgcgccagccttggattgatgcccgaggcgataccaccgtctattccggacgtggaagaaatctggccgacgacggccgccgggccgccaagcgcggggcctcgtcgcgtgaatggcaggggcgcacacagacgccactgcggtcgcgcgacggtggggcgatcacccagatgtcctatgccagggccggcatcatcactcccgagatggccttcgcggccgcccgtgaggactgcgatcccgagttggtgcgcagcgagttggcggctggccgtgcggtgatgccgctcaacgtcaaccatcccgaggcagagccgatggtgatcggctcgcgcttcctggtgaagatcaacgccaatatgggcaattcggccaccacctcgtccatcgacgaggaagtcgccaagctcacatgggccaccacctggggcgccgacaccgtgatggacctgtccaccggcgccgacatccacaccacccgcgaatggatcctgcgcaattcgcccgtgccgatcggcaccgtgccgatctaccaggcgctggagaaggtcaacgaggacgcgtcgaagctcagttgggagatctaccgcgacacggtgatcgagcagtgcgagcagggcgtcgactacatgaccgtgcatgccggggtgctgctgcgctatgtgccgctcaccgccaaccgcgtcaccggcatcgtctcgcgcggggggtcgatcctggcggaatggtgcctggcccaccacgaggagaacttcctctacacccacttcgacgagctgtgcgacatcctgcgcgcctacgacgtctgcttctcgctgggcgacggcctgcgtccgggctcgctggccgacgccaacgacgaggcccagttcgccgaactgctgacgctggccgagctcacccgacgtgcctgggccaaggacgtgcaggtgatgatcgaggggcccggccacgtgcccttcgacaccgtgaagatgaacgtcgagctggaacagcagctgtgccagggggcgccgttctacacgctcgggccgctggtcaccgatgcggcccccggctacgaccacatcacctcggccatcggcgccaccgagatcgcccggtggggcaccgccatgctgtgttatgtcacgcccaaggaacatctgggcctgcccgatcgcgacgacgtcaagaccggcgtgatcacctacaagatcgccgcgcacgccgccgacgtggccaagcaccatcccggtgcgcgggatcgcgacgacgccatcagcaaggcgcgcttcgagttccgctggaacgaccagttcgacctggccttcgaccccgacacggcccgcgccctgcacgacgagacgctgccggccgagggcgcgaagctggcccacttctgctcgatgtgcgggccgaagttctgctcaatggccatctcgcagaacattcgcagccggttcggtggggcgctggagcaggccgccatcgtgaacggctcgacgacgctggggatgccggccccgatgtcagccccggtggcagccgcggcacccacgacggcgcaggggactggggtcgatggcggcgaggtgattgccacgccgcagggcctggccgccgcgatggctgccaagagcagtgagttcctggctgccggcggacatgtctatgttgctgccgaccaggcggggcgcgccgaccgggagtgagttcggcgcctcgttgaaccgttgcacgacggtgttggccgggaccggggacgagccggtcccggtcaacatcgtgtggtgacgtgtggtgacgtgtcagtcgcgggcggcgcggttgatggccagctgtgtggcccgctccaagcgcttgctggcgggttgcccgtcggcccagacgagctggccgtcggccagggccgccaccacgcgtccacgatcgaccagcatcgggcggaacatgccgttcttcgagggactcagcagggtctcgccggccgcgtcggtgaggcagctgcgatcctggtagccgatgtgcagctcgtcgaaggcgggcagcagcatggtgcgtcgggcggcgggcaacgactgggccagcaggtcggccaggtcggcgcgcagcacgaactcgccggcaggggcctcggccggttggcgtccccccgcgacggcgtgggccatccgcagcaattgcgcgcccgacatgcgcaacaggggcaccatgtgcgagccgtcgaaggcagacgccccggggctgtcggcggccgacaccgcgtcgcgcagggcacgcagcgccacggtcttcgacagaccgctccaccgcgccaggtcggcggcggtcaccggcccgtggctggtggcgtagcggcgggcgatctcggccagcgcggccgggttgccggtgggggccttgctaccgcggccggagtggccggggccggtggtggcgtcgggaagcgtgcgggcgtccacgagcagcggctcattgccctgcagggggccctgcacgagcagtccgtcggcatgcagccagatgatcagggaacggcgcaggtggccggcgccggcggcatgcggatcggcgggcacgacgccgcggcgcgcccactcgttgaccagcgtgcgacgcgagacggcgccatattcgccgatcagttcgaaggcgatgtcggcggcctgcttcagtagcttctcgtcgacgccgaactcggtctcggcgcggtgcttgaacgcggcccgccggttgtccagtgccacccgcagccagtggtggtcctcggccgtggtcacgtggatggtgccgcgcatcggccacgagcgcatcagctcgcggtggttgaatgcggcgcgcactccgtcggtgctggtctggcgggtgcgggcggcgatcgcgtccagggacgatccgaacagttggccttgcatggccagctggcggcgcaccgcctcatggggcgtcggcgccgacgtggccggcacgagtccctgggcgacaatgcgcagcagcgagatggacgtgggcagcgctggcggcgggggaactcgaggcacatcttcacgttagtgccgccggtctgtcgccgacggaggggctgcgggttgacacggtttcccctgcgactgccggaggggaaccgtgtcatcgatcagggcatggccgtgggaaggatcatggaggccatccatgtgtcggaggccagccatgtgtcccgtcccgggaaggggttcctgctgcggggtcaggcggctcgcccgtcaccatcgacacggtcgagatagtcctccaacgcgcggcgcatgatctgtgaggcattggtgttgtgggcggccgtgaaccggtcgagacgatcgttgagttcttcgggcagtcgcacctgccgtttgggtgagcgtccacgtccggtggcattgccatgtccaaggcttgggtgtccaacgcgggcgagcagtgcacggctggcttccactgcctgatcgccgacgaggacgtccggggagtcccatccgcggccttcgtcggcgtcgatctgctcgatggcttcgcggtagtccctgtcctgtgcttccatcatgctctcccctctagatcgcaacccagagcgatgagtcgctcacgggtggtctgcctcacgtccatgcaatggaacatgaccaggttccggtggcggtcgtccacgtcagcgaacacctcaatggtccttcctcagcgcgccggcccgacccaggccgccggcggtctggcatgacccgggcgggttggcgggaaggccatgacgaacgccaacggtgtctccatcgcatggatcgcatcttgcttggtgtatccgtgttcggcggcgctgtcggtgagctcgatgcccatccataaagggtactaccgtttagggtgatccctaagggccaatcacaccaacggccggcgggttgtcgaagtggaccgtgatgccgcattgatcgcagtggtgcactcactcggccaccgttgccgtcatcgggatctcagcgtgcgtggcacgatggatcagatcggggtcatggccaggaccagaggggctttccccggggtccgtggcatggggaggaacgccggatgttgcccgaatgggaacctgcgcccggcatcgtcgacgacctgcagctcgacgactattcgccgctgatgatcatgggtgacacggagctgctggtgcgcgcggtgcgcatcagcgccgccgaatgcgtggcgctcgacgcggagacgcgtcgtcaggtgcaggcagttgccgatcgtcgtaccagcgtgtcgagccagcttcccgagctcgatgagcgccgtgccgccaccgccgtcgccggacgcctgctcgccgggcaggtgctcgccgagagcaccatcgccaacatggtggcgctcaccgccctgcgctcggcactcaagcacgtcgacttcgacgactgggacctgtggcaacgcagcgtgccctcccgggactacgcccagtggccggctgccgcgacgttcgtgctcaaccagatctttccgtccaccgccccgcgcgtgatccacagcgatggcgagctgctgctggtggtgccgatgcgcaccgccaagcgtgctgccagctattgggcgatgggtgccaagccgatccgacgtccggacaacggcggccgggaataggtgcgacaaaagcaccgtctaccgtgcttcatccgcacctatctcgtgttcaccaccgatcagcggcggcggcgaggccggctcacacgtggatcaggatctccccgtgcagcaggctgaaccagccgtcgggatcggccgcccagtgccgccaggcctgcgagatctgctccagctcgtcgcgcgtcgccatgcccgacgacgtcagctgctcggcgatcgacgagtcgaggatgcgctgcgcccacgtgccaccccacagctgacgggcggcatcgtcggcgtagcaccacgtggatgacgatgccgtcacctcggtggcaccggcgccatgggcccaggccagcaggcgtcgtccggcatcgggctcgccgccattggcccgtgccgcagcccggtacagctccagccagcgggtcaggccggccgactcgggccaccaggtgaatccggcgtagtcggaatcgcgcacggccaccacgccgccgggacgggccacgcgcatcatctcgcgcagcgcgaccaccggatcgcccacatgctgcagcacctggtgggcgtgcaccgcgtcaaagctgtcgtcgtcgaagggcaggtctgccacgtcgccgcgccgcacctccacggtgccggttccggcggcctccagcccggcccgggtgaccgcgacggcctcgtcggtgacctccagggcggtcacgtgcccgggcgcgaccaacgcggcaaggtccgccgtgatggtgccggccccgctgccgacgtccagcaggctcatgcccccacgcagcaacggcaataaatatcccgccgagttccgcgcggtgcgcgcccggtgcgaggcgagcacgctgggggcgtaaccgtgcgtgtagtgggtatgttcagtgggcgtggcgcgcatggtcgcaggctaactccgcttgtcagcgcggcgtggcgctgcccattgtcatgcccatggtgccggcgggatggaatgctggacgatgagccccggccgcgtcagcgggtggggccgccaatcagacagttcccgaccagcagaggcagccctcgtgacatcttcgctcttctcgccactgaccatctccgcgcccgccggcgacggcctgaccctgcgcaatcgcgcgatcgtgtcgccgatgtgccagtacatcgtcgacgcgcacgacggcgtgccgctcgactggcacctgcagcactacggctcgctggcggccgggggcttcggcctggtgaccaccgaggcgacggccgtggaaccgcgcggccggatctcgccgcgcgacatcggcctgtggaacgacgagcagcagcaggtgcatgcccgcatcgtcgacttcgtccactcccagggcgcggccatcgccacccagctgagccatgccggcggcaaggcgtccacctatccgtggctgcccgaccagcccggcggcaccgtgcccgcggaccagggcggctggcagaccgtgggcatcaccgaccagccggtcttccccgggctggacgcgccgcaggcgctcgacgcggccggtctgaagcaggtcgtcgacgcattccgtgaggcggcccggcgtgccgacgccgccggctatgactccatccagctgcacggtgcccacggctacctgatgcaccaggccctgtcgccgctcaccaacacccgcaccgacgaatacggcggcgacctgccggggcgttcgcggctcatgcgcgagatcgtcgacgcggtgcgttcggtgtggccggccaccaagccgctgggcctgcgcctcagcgccaccgactggacggagcgcggcctcgacctggagaccgcggccgccgtgatgcacgagctggtggccgaccacggcctcaactggatcgacgtctcctcgggtggcctcaatggcggcccgatcccgatgggcccgggctaccaggtgtcgctggccacggccatcaaggacgcgctggtcgacaccgatgccgtcgtgtcgagcgttggcatgatcaccgacgccacccaggccgagacgatcctggccaccgaccaggccgacgccgtgagcatcggacgcgccgcactgcgcaatccgcactgggcggcgcaggcggcggtggaactcggcgtcccgctggaggacaacccggtggccgaccagttctggcgcgcctacctgtaggccgggacgcccggcgccccgcggcccggcccctcggggccggatctcaggcgagggcggcggccagttcgcgttcgacgacaggctcgtcggcctgctcgccgcgccgcagggccaggcccagcacgaggcccaccaggctgagcacgatcgagaacaccaggccctcatgcaccccggcgatggtcgccgccgacgacgaggcccctgcccgggttgccgcaccgcgtcctgcgctcagcaggccggcggcaaaggcggtacccagtgcgccacccacctgctgcagggtgctgatggcggtggaaccgtcggcgcccagacggtccggcagggcattgagtccgtgcgtctgggtgggtgtcatggccagcggcacacccaccatgagcaggcagtggaaggcgacgagcatccacagtgggctgtcggtgcccaacagcaggaaggcggctgcggccacggtggcgatggcgaagcccgcccgggcgatcacccacggacggtgggtgtcggtggcgcgtccggcccacaccgacaccaggccgttgaccacgccggccggcaacatgatgaggccggcggtgaacacggccaccgaccgtccctgctcgaggtacatcgggatcaggaagatcgcgcacatcagcagggcgttgttggccaggatcagcgccgaggccaccgcgaagttccgacgggcgaacaccctcacgtcaaggatcggctggggcagatgcagctgacggtgcacgaacacggcgagtgcgacgatgcccaccacgaagctgccccaccccagcgggttggtgataccaaagagcccgcggaactcatggcgaacacgaagagtcccaggccgatggttgacaggccgatggaggcagcgtcgatatgcggacgggtgatgggctgcacattgcgcaggaacgtcgtcgagacgcccaatgacagcgccaccagcggaagcatcagccagaagatccactgccaaccgatcgtctgcaccacgagccccgacacggtggggctgatcgccggggcgaacatgagcaccaggccgacgagtcccatggcgctgccgcggcgttcgggcggataggcggccacggcggtggagacgatgagggggatgaggatgccggtggcggcgccctggatgaggcgtccggccacgagcatgccgaagcccggtgccagtgcgctgaccgtggcgccgacggcgaagaaggccagggcggtgaacaccaactgacgggtggtgaaccagcgcaccagcaggctggacagcggcagcagcatgccgaccatcagcagatatccggtggtgagccattgcgccgtggtggtgctgatggcgaagacatgcatcaggtcgggcagggcgatgttgagtgcggcttcactgaacaggccgatgaagccggcgagcagcgggcccagcagcaccagaaaagggcgcgtcggggtctgggttgatgaggtggtcaaggggtgcctttctcgggggatcgacgtggagataccgacggatcccagatacttattaaaacatacctattgcatcgtacacgtttcccgagcagactgacgccatggaccagccggcacggggcgagggcgtacacgacgacgatgcacccgcggagcatgtacgcggcgagcacgcggtgacgccgtccccggacgatcgaccccgcgacaagcagctcggcgaactggccgatcgcatcgtgcgggtggcacgccgcatcgaggcacatcgcttccgggacccgctcatcaccccggtgagcccgctggaagccctgttcctgcgctacgtagacgaccatcccggcaccagcccgggggtgttggcgcgcgacctgatggtgcgcagcagcaatgccagcgccggattgcgatccctggagcgcaagggcctgatcacccgcgctgcagatcgggacgacgcgcgcgtcacgcggctattcgtcaccgacgacgcgcgccgcgccactgcccgcgtccgggcggaatgggcccacctgctgagcgagctcctgcccccttcggtgaatgtggccggggccctccacgtgttggaactgctggatgacgcacccgcggaacgcgagccctgactgcaggcccgattgcgcagtccagtgcccggtcgggtcgggagcctcattcgggtgcacgcctggtgcgcccagcagcccggcccggtggccgccagtaatcgatcagatggtgcggactcggggactcagcgctgcatatccacgaagcggctgtaatggccctggaatgcggtggtgatggtggcggtggggccgttgcggtgcttggccacgatgaagtcggcctcgccggcgcgcgggctgtcgcggtcgtagacgtcctcgcggtgcaacaggatcaccatgtcggcgtcctgctccagcgatccggactcacgcaggtcggacagcatcggcttcttgtcattgcgctgctcagggccacggttgagctggcagagcgccaccaccgggatcgacagctccttggccaacagcttgatctggcggctgaactcactgacctccagctggcggctctccaccttgcgtcccgaactcatcagctgcaggtagtcgatgatgatcagcttcaggtcgttgcgctgcttgaggcggcgggccttggcccggatctccatcatcgtcaggttgggggagtcgtcgatgaacagcggcgcctcctgcacctgaccggccttgcgcacgatctggtcccattcctcgtcgttgagcttgccgttgcgaatgtggttcagcggcaccgtcgcctcggcactcagcaggcgcatcactaattcggtctggctcatctcgaggctgaagtaggcgcagggcagcttgttgctcaccgccgccgaacgggcgaagtccaacgccagcgtcgacttaccgacggcgggccgcgcggccacgatgatcatctggccgccgtgcaggccattggtgagctcatccaggtcgatgaacccggtgggcactcccgacatcacgccggtgtgcgattcgatcgcctccatctcgtcgatggtgggctcgagcagctccttcagcgacttgtagtcctcgctggtcttgccctcgctcacctcgtagatggtctgctgggcggcgtccacgatgtcgggcacgtcgccggcgccctggtagccgagctgcgcgatcttcattgacgcgtcgaccagccggcgcagcgtggccttgtcgtgcacgatctgggcgtagtagccggcgttggcggcgatcgagatggactgcatcaggtcgaccaggccgacgcgtccacccacccgctccagctcgccgcgcttgtcgagctcggcggccacggtgacggcatcggcgggttcgccgcgtccgtacaggtcgatgatcgcctcgtagatcgtctcgtgcgccgggcggtagaagtcctgggggcgcacctcctcgatcacgtcggcaatggcgtccttgctcatgagcatggccccgagcacgctctgctcggcacccacgtcctgtggcggagtgcgatcaaggtcgccggccagtggcggacgatccatctctatggcgctcattcgctccctctccgaacggttggtccgaacggctcgtcgggcacatgtcttgtggtcccgatggtcctgcacgggcggtggtgactgcccggcaagcattgtgcccgccgccacctacagtttctggccgcgcactggccgatcgggtgccccggtgtggtcctgtgccctgtcagcgcggtgtttcccggtcgtggtgcccgtgtggttggcccatgtcgttgccccgtgcggaccccggcgggcggggtgctggacggtgggaacgacctggtcgcggcgtgtgcgtgcggcgtgtggttgtggcgtgcgaggcccaacggtagccgccccgaaaacctgcggcaagggtggttttccacaggccctgtggacggcatgtggaccgttgtggacgacccgcctgagcgcatgtggacgacgggatactgcccggaaaactcgtggacgggtgccgggcgcacagccccgcggcggcacttccacgcggggaaagcgcggaactgacgtttccggcggggcggggagcatccgcgtccgcgtgggggatcggtcgacgaccggaaaggaagggatcgcggtgtggggattgtcggatggcacttatgcacagcgaatgtggatatctcggttttgtgctgatcccgggtccgtgggccggacggatgggcgggattggtggggtcgggtaccgggtccgcggccccggagtcggagcgccccggcacgggtcggcggggcatggcagtgacgtggcagtgcggcggcgcgccccgggtccgggtgccggcgatgcccgcaccgggggcgtccggccttccgtggatgggcctgatgggcataccctgtgggggtatcgtcctgagcgcttgccaataccccccgggggtattaatctgacgtccgtgagtgaagcaacgaaggctcgcggggtcaccgacctgccgctggcagccgatccggaaagcacgccggcaccaaccgccaccgtggatgatgcgcatggcgattgtggctgcgatggcgaatgcaatcaccaccacggctatctggataacaaggagaactacctcaagcgcctgcggcgcattgagggccaggtgcgcgggctgcagaagatggttctcgacgagaagtactgcatcgacattctcacccagatatcggccacctcgaaggcgctgcaatccgtggcgctggcgatgctcgacgagcacatgagcacctgcgtggtgcgcgcggcccgcgagggcggcgacgaggccgagatcaagctggccgaggcctccgacgccatcgcccggctggtcaggtcgtagccgatcgggcccggccattgcgccgcgacccccgttcgtgaatcacaccccgctgagtcacgccgggtcgcatcagacacggtcccccagcggacagcacatcaacaacccctcagaagaaggaagtaccaccatgaagagcaagtacgtcgtcaccggaatgacctgcggacactgcgtcaaccacgtcaccgaagaggtctcggcgctgccgggcgtccgcaaggtgaaggtgaagctcgacgacggctcgatggccatcacgagcgccgagcccatcgacttcgacgcgatcaaggccgccgtcaccgaggccggcgaggactaccaggtgcagcccgcctgacgcggaactgacctgcccgactcggcgcgccgtggtcccactgaccgtggggccacgttccgcgtgtcgacgggtgcctccacgccccaccccccgttgaagggaatccgatgaccaaccgtgcgcacgagcaagcaggcggcacttccacgccgcccgatccggtacctggtgggcgccctggcgccccgggcctggtagctgatgattcggccggcaacacggtcgtgctcgacgacaccatcaccattcccgacgatgcccgcgacctggtgagcatcgacctcgacgtcaccggcatgacctgtgcgtcgtgcgcctcgcgcatccagaagaggctcaacaaggtcgacggcgtggaggcggcggtcaactacgccaccaacaaggcgcatgtgacggcgccggccgccacgcgccccgaagccctcatcgaggtggtgcgcgacgccggctacgacgcgtcccttcccacgcctgacaccgactccgacgagctggccagtgcggatgccgattccatcaggcgacgcctgatcgtggcggcgatcatctccgtgcccgtgatggtcgtggcgatggtcaccccgctgcagttcccgggctggcagtgggcaagcctggtggccgccacgcccgtgctgttctggtgtggttggggcttccacaaggccacctggaccaacctcaagcatggctcggcgtcgatggacacgctgatcagcgtcggaaccatctccgcctacctgtggagcgtctactgcctggtcttcggcagcgccggcatgatcggcatgcgccacgagttctccttcgccctgtcgcaccacgacgccctgggcagcgtctacttcgaggccgcgtgcggcaccatcaccttcatcctgttgggtcgcctcatcgaggcccgctcgcgccgcgaggccggctctgcactgcgggagctgctgaagctcggcgccaagcgcgtccgcctgctcgacgacgacggcaccgagcacaccgagcccatcgaggcgctcacggtgggccagcagttcgtcgtgcgtcccggcgagaagatcgcctccgacggcgtggtcaccgccggtgaggccgccatcgacacccgcgtgatcaccggcgaatcggtgcccgtcgaggtcggcccgggcgaccgcgtggtgggcgccacgctcaacaccaacagccgcctggtggtgcgcgccaccgcggtgggctccgacacgcagctgtcccagatcgcgacgctcgtggagcaggcccagaccagcaagtcgaacgcccagcgcctcgccgaccgcatcgccggcgtcttcgtgccggtggtcatcgtgctggcgctcgtggccctggtggcctggctgatcgccggtgcgggcatcagcttcgcgatcaccgccgccgtatcggtgctgatcatcagttgcccctgcgcgctcgggctcgccacgcccaccgcactgctggccggcaccggacgcggcgcacagctgggcatcgtgatccgcggacccgaggccctggaacgcgccaagacgatcgacaccgtcgtgatggacaagaccggcaccctcaccaagggcgagatggccgtgcagcacgtggtggtcgcccctgcaaccgatggacgcaaggacgtcggtaccgacgccgtgctgcggcgcgtcgccacgctcgaggccggctcggagcatcccatcgccgaggccatcgtcgccttcgccgaacaggcgggcgtcgagccggaggccgccgacgacttccagatcatccccggactcggcgtgcgcgccaccgtggcggggcaggcctcgctggccggcaatgccgcgctgatggaacgcgaggagctggtggtccccgccgagctggtcgccgcggcacacagcgccgccgacgagggcgccaccgtcgtcttcgtcgcctggcaggccgcagtgcggggcctggtgacggtcagcgacgagatcgccgacacctcgcagcgcgccatcgagctgttccaccggatgggcctgcgcaccgtgatgctcaccggcgacaacgagcgcgccgcgcgtcacattgccgcccaggtgggcatcgacgaggtgcacgcccaggtgttgccgcagcagaagctcgaggtggtcacccggctgcagtcgggtgacgccggtcagggtgtcccgggactggagggtggctccgatggctcgggccgtcaggcctccgggcaacagggtcgtcaggagcaccgcgtggcgatgatcggcgacggcgtgaacgatgccgccgccctggccggggctgacctcggcatctccatgggctcgggcaccgacgcggcgatcgccgccagtgacctcacgctgatgcgccacgacctggtgcttgccgtggacgccatccgcctggcccgggccacgctcggcaccatccggggcaacctgttctgggccttcttctacaacgtctgcgccattccgattgcggcattcggccttctcaaccccatgatcgccggcgctgcgatggcattcagctcggtattcgtcgtgacgaattcgctgcggttgcgccgctttcgtccgactcccgaggtagcgcgcagctagcccgagcgggcggccgccgccgcggcgaggtagcgggggatcgcgtgacgacgcacagccccgtggcacgcaccgccgcagcagggcacccctgacaccgggggatggaccacttcaagcacgtggcccgtcccccggtgtcgtcatgtggaggccaccatcgggcgggccggcgtgggcatccggtaatctgcgcgtgacgcccggaccggcgtcgtggtgaaagggcgagacgtgagcaaccagcagggcatggccaaccaacatggcgtcggcggaccgtcgatcaagtacccgatcaccggcgcgtggtggggtgaccccgacgccgagccggtgcccgaaccgcgtcccgatgccgagggcaaggtgcgccgtcaggccttcagcgttaccctcagctggcccgacgcctggcagctgacccgcgacgtgctgcttgccgattctcgcgccatcgaggcgggccacaagatcggcgacaccgatgagagcaactggctcaactacggggtcacctatctgtcacagttcgtgggggcggtgtcgctgggatgcggcatgctcaccgacgtcggcacgcgcctgcgcggtgccatcgacgccgaccagccggtgctcgtgcccgactggctggcggagcgtggtgccggtgtggcgcccgagcagatgccggcggtgatcgtcgatttcctcgcccagcggctggtggccgagcaggagtccgatccgacgatcgcagcccgcgcctacggcatgctcgtgctgcgtgcggcgctgcgcgacgacaagtccgagttcgccgacctggtgaatccgcaggccgagcccgagtggctggtgcccggcgtgcaggacgcctgcatcgccgtggccgtgatggccgccggcgtggcgtggggcgaggagcagaagccctcggccgtggtggccgagaccggttatgtgttccccggcgaacgggttgccgcgctgctgcgcgccgtcaaggtctgaccgcgacggggttcgggccgggcggagcctgaccgggggagtcccggcgcggactgccccagtgggtcgtgcgcggagcatggtgacgccgcggcgcagggcgttgcccgggccgctacttgaggatggcgtaggcgcccatgagcaccacgccggggacgaagaggacgaagcccgcaatcagcagtgcccgtgccgggccggcatagaagccgcgtttcagggccaggcgtaccgcgccgatgattgcgccgaggacgcccacgacgagcccgaaggcggccacgatggtgccgagagccagcagggggttactcatcacgtggtcgatgaggtcatgcatcgtctcttctttcaggtcgatcaggtgcggccggggttggcacgcaatgatgtgggccccgctccggtcgtcgcgaccagtgcggggcccacatcagaaaattgggtagccggaatcagtgaacctgggcgagggggttcttgcgggcctcgtcctcggccttcacgtcgtcgaggccggcggtcaccgacgagctgagcgccgagatgctcgccttggtctcctcgatggtggccgtgggcatcttgaccttcttcacctgcagccagccgatcagtcccatgacggcggccagcaccagcgcgatcaccgcgaaggtgacgaaggcaagggccagggcggtgaaccagtcacgcccggccacgtagtggtagaagttcgccacaccgaaggtggcggcccacagcaggcacttgaaggcgaagaacgccgaggctccggcgccgccgaagagcccgccgccaatgcccgcgtgctttgcggacggcacgagctcggccttcgccagctccttgatacccgcgatcatcttggggatagcgcccttgatggtggcgatctggtcacccaggcgtggacgatctgacatgctcattcctccgtaatcacaggtaccggctagatagagactagtggtttcgcggtacttcagtgaatcacccggccattgccgtggtgacaatgggggtggtttcgcgcaggccgatgcccaacatctgcaggttgcggcggcaacgaattgttgtgggctttcccggtgatgccgtgccgacgccggctcgacggtggccggggcagccgtggcagtggcaggtgtggtcgttgatgggccgatggttgacggggcgatgcctgatgggcgcgacggctgacgggggcgagggcgcagtgggcccggtgtcgggtggggtgacgcgcgaccgtcaggcgtccgccgctcggtgggcccgcaccctgcgccgcagcagcaccgaggccaggaccgccgagatcacgctggccagcagcaccgcggccttcgcctcatcgagcaactgggcgttgtcggcgaagcacagctcgcacatgagcagcgagatggtcaggccgacgccgccgagttgcccggcggccaccacatcgcgtccgccgagtccacgtcccagctcggccggtgaatgacgcaccgtcagcatcgtgccggccaggatgccgagcggcttgcccaccaccaggcccgccaggatgccgagtgccaccggctgggtccagatggcgcgcagcaggctggcgtccacatgcactccggcgctgacaagggcgaacagtggcaccacgagtccggccgaccacggttcgacggtggccttccagcggtcgaggggctcgtccatgccctcggcggtgttgcgcgtgagcagcccgacggcgacgccggccaaggtgggatggatgccggaattgagcatgcaccaccaggcgagcgcgcccagtgggaggtagagccagccgttgtcgatgtggcggcgttggcccagccaccacagggccatcgcggccagtgagccggccagccaaccccacgagatcgtgtcggtgaacaccacggcgatcaccaggatcgagccgaggtcgtcgaccaccgccagggtgagcaggaaggcccgcagtgaggggggcatcgattttccggcgatcgccagcaccgccagggcgaaggcgatatcggtggccatcggaatggtccagccacgcagctcaccgtgccccaacacgttgacgagcaggtagcagccggccggcacgatcatcccggccgcggcggcgacgatgggcaccacggcgtcgaccggacgacgcaggctcccctcggtgaactcccgcttcagttccagccccgccacgaagaagaacaccgtgagcaggccgtcgctcacccagccggcgatcgtgtgcgaacccagctggaattgggtgaagccgtggtagctggactgcgacaggcatgcccagacgatggcgaccgcggcggcggccagcatgatgaggccgcccaccgtcgaggtgcgcagggcatccgcgaggtgcagggcgttggcgtgggagtggcgacgcggcgcgcgcaggcgcggccaccagtgggtgttccgagtgggtgatgtgggcatcgattcgctttcgtgctggacgactcagcccgccgacagggtcggcgtcagctcttgttcgtcgaccagacttcccgacacaccgtggatcagtttagacggtgggggaagggtccccggacgcggcgggtcctgcccgcgggcggagtgccgagctgatggtccctccagcagtcacgggatgtgatggcgttgagcgtcccgccgggagtgggcgcagtgcacgaggtgcgtgccgctagagcggaatacggtgccaatgatccttccgctagagcggaatgctgtgccgatgatccttccgctagatgtacttccccgtgacgttgtgaacgcgggctgagggagtctggccgccgatcccggtgtggggtctgtggtgattgtagtgatggagccaggtctcgtaggctgcggcgcgctcggcttcgctggcgtagggcttcgcgtaggcccactcgacggcgagggttcggttgaaccgctcgaccttgccgttggtctgcggccggtatggccgggtccacttgtgcttcacctcgtcgccgagcgcgtcagcgaaggcgcctgaccggtagcaggaaccgttgtcggtcatcaccgcggtgactgtgacgcccaggcctgcgaagaacgcgttcgcgcgggtccagaaccccgctgcggtctctttgcgctcgtcgtcaaggatctctgagtacgcgatccgggagtggtcgtccacggcgtggtgcagataccggtagccgcgagagccggctgccccggcacgggctgccttgtcgcgggccactcccgcgtgacggtcctgcatggatccgcgaccgtgggcacgccacccgccgccgtcggggatccggccttgtttcttgatatctacgtgcacgagctggcccggcgcggcgacctcgtaccgtgtcggcttcgggcggcgaaccggcagcccggtggcctggtcgatgttgatcagcttcggcatcttgtatcgggcgagcacccgaccgaccgtggaacggtgcaaccgcaggtgatacgcgatccggtgcggaccccaccggcgagtgaaccgcaacgcgacgatccgatgctccgtcttacgcgaaagccggttcggtgacgaggtgggcctcgaactacggtcgatcaacggcagccctgcccggtacctgtcggcccaccgcttcaccgtcgcgggcgagcactggaaccgttccgccgcccgccgcaacgaccagccctgttccacgacgagaacagcaagacgacgacgcccttccggtgtcaagggtgcgttagcgtgagtcacgaagacctccgtggtcaggagagtgagtgtggtaacccacatcctgcccggaggtcttcgctacctcacccgttcacaacctcccggggaagtacagctagagcggaatgctgtgccgatgatccttccgctagagcggaatgctgtgccgatgatccttccgctagagcggaatgatgagcgcatcatcgctgagcacgatgggcgtggtcagctcgtcgtggtcgacgtaggcgcggtagcacgacagctggtagggcaaccgcagctctgatcctgccgacgccccgtcgtagattgcgcccaccgcggtgagcaggcggtcacgcccgagctccggtagtgccgcgacgcgcggctggctggcggccatcgcgatcagttcctggcgcgtcaccggcacccagatgcggaagtcccgctgctcatggcgcgggaagtacttgctcgagatcagcgtctgaatggcgctggcccccacatcggcgctcatcgcattgggatccacggtgcgcatcacggccaccaggcgtcgcacccacggcacggaatcgtcacgcaccaggtaggaggcgcccacccatccccccggcttcaggacgcgggcgaactcgccaagcaccagccccggcgccaacttgtgcagtatctggtgggcgagcaccacgtcgaactggcacggctcgaagggcagggactcggggcgcgccaccacatactgcagctcggggagatcaggcctcgggttgaggtcgtggtcatcgtcgacgatgcaccacacatgctgtccgcggcgggccagcttgcggggcagccccgctccggggccaagtgtgagcacatggcggtcggtgcgctcgccgaccagccattccagcgcagcgtcggggaatcgaggggcaccggaagacatgtacccatcctatgagcgtggtggtctcccttcggtcgaggttcaagcggtctgtcgctgccggctgctcgtggttcttgctggaattgtgggcgcgcgccggcccggacgcgcttgtccacaggtgccgctgttccggggattggttatccacaacgtggaggtggcgcgatatttcgtggtgtccacgcacacgctcataggtatgaacgactcccgccgcgagcccaggcgcatgcgatcgcccaaggatctgcccaaccccaagccgtggggtaggccgtcgcacgacccggccgtcctccccgtggcggccaacggggtggagcccaccgcgatggaatacagcgcggcgggacacggtgcgacgcccggcacgatgggacatcgccccgtcgtgccgcagggcccggtccggcgaggcccccgcctcctgcggggtggcacgcacccggcgggcgacaaccccgatctggagcgccaacgactcggagcgatggtccccgggcgatccacccgcggagccggaagctcccgtcgggggatgcccggtggggaggggccgttcccgttggtcgtctgccaggaccgtcggctcatggacatcgtcatgtcggccgccgcatcgtgcggcaccgatccgcgcttcgtgcgcgagcccgacgacatccgacggtggtgggcgcgcgcgtccacggtgttggtcggcgtcgagatggcgccggtcgtcgccgggctcgggctggctccccgcaccgccgtgcacctgatggccgccgacgccgcggaggtgacggcgtggtcggtacccctcagcgcggccgtgctggtgcttcccgaccaggcaggttgcctgcccgccgtgctgggacaggcagaccccggccccggcggcagggccacggtcatcgacgtgatgggcgacagcggtggggtgggggccactaccctggccgcggcactggcccagcgatgctccgcccggaacgcccgatcggccctgatcgacctcgacccctgcggcgggggcgtcgacctcatgttcggcgccgaacgcgagcccggatggcgctgggacgacctgacctcggtgtcgggcacggtgaacgacatcgccgcccggctgccccgggttggcggctttccggtgttgtcgatgggtcgccccggcgcagaccacgccggtccgcagcttccgggtgcggccgcggtgcgggcagtgctcgactcgatgtgccgcaatctcgacgtggtggtgctcgacgatcccaacccccagaactggccgggtgccgagaatgcgacgcgcgtggtcgtcgtggccggtcatgtgcgcgccgtgatggctgcccgcgcacggacccttcaacacagttggggcgacgcgcaggtggtggtgcgcaccgggcccggcatggggctcgacccgagggcggtggccgactgcctggcgctgccgctggccggcagcatctgcaccgatcgtcggctggtgagcggggcacaggtgggcgagccgcccggacgccagcgggccggcaggttcgccaagcaggtcgacgccctgctcgacgccgtgctcggcaggatcgagggggagtcccgtgcgcgacgatgaccttgaactgctgcgcggctggctggccgggcgcggcagcgactggggaccccaggacgtggccgtggggcttgaccggctcggcttcgtcgtctccgatgccgctgtgttgtccgccaccgacgcgttgcggcgcaccagcgtcggagccggtccccttgagccgctgctcaacctgcctgacgtcaccgatgtgctcgtcaacggcgccgaccaggtgttcatcgaccggggacgcggcctggagaggacccaggtgtgctttgacagcgacgacgaggtgcgccgattggccacccgcctggcggcctccgcgggtcgccggctcgacgacgccgcaccctgggtggacgcccggctgcccgacggcacccggctgcacaccgtgctggcctgcctggcagagccgggcacctgtatctcgctgcgcgtgccggcccggcgccggatgaccctcgatcagctcaccacagacggcagcatcgacgcgcgcatcgccgacgtgctgcaggggctggtggccaaccgcgccgcctacctggtcaccgggggtaccggcacagggaagaccaccatcctgggcatgctgctcggattggtgcccgacagtgagcggatcgtgatcgtcgaggactcacgcgagttgaatccgacccacgaccacgtggtgcgcatggaatgtcgccccgcgaacgccgagggcgtcggatctgtggcgatgaccgacctggtcaagcaggcactgcggatgcgccccgatcgcctggtggtcggcgaggtccgcggtcccgagctgtgcgatctgctcaccgccatgaacaccggccacgagggcggatgcggcacggtgcacgccaactccgtcaccgacgtgcctgcccgcctggaggccctggctgccctgggtggcatgggtcgcgaggcgtgccatgcccagatggcctccgcgctcgacgccgtcatccacctgcggcgcggacgcgatgggcgtcgcggcgttgcgcagatcggcgtggtgagcgtcaacgacgacggccgggtctccatcgccgaggcgctgcgcggggccccgggagccgggtccgtcccggcgccggcctggggtgagctcgccgccctggcgggggtgacgccatgaacgtcgccatcttcgtggcgctggccgcggccgtgtggctgttggtgccggcacggcaggagaagaggctcgccggccttgatcttgatgccaggccgctgccccggtggcctggcatcgtgctaggcgtcctggccgtgctgggcctgctgggagcctgcctggccttcgtgccccactatgtggcgtgggggctcatcgcctgcgtgctgggtgccaccctcgcctgggaactgcgcatgcaccgcgccgagcgatcagccatcaagaggtcgcaggaggtggcccacgcctgccgcgtgatgtcggcacaactgcgcatcgggcagacaccggcccaggcgctcgccgtggccgccgaggaatgcgaggtgttggcgggatgccgggcagcccagcaggtgggtgccgacgtgccccgcacgctgatggcggccggtgacctcccgggttgctcggggctggccgccctgggacgggcctggaagctgtgtgagcggtccggcagtccgctggccccggcggccacccgggtgtcgcagacggtcgatggtgatgcccgcctgcgtgccgatatcgccgccgagctcgcggtgccgcgtgccaccggacggttgctgacggcgctgccactgctgggtatcggcatgggattcgtctccggcggcgacccggtggcattcctcaccaccaccatgatcggcaaggcgtgcctggtcggtgcggtggtgctggtgtgcgccggactggtgtggaccgaactgttggcaacgcgagcccaggagcaccgatgatcagcccggccgtggtcgcagggctcgccctgctcgtcgccgggtactgcctgttcggcggcgacgaggactcccggctgcgccgcctcggcgcgcccgatgcgctggtgggcagcgtcgaggaggtccccacgcagggcctcgggcagcgtcagcggatcatcgggtcggtggccgtcgcgctggtgtccgcgctgctggtccccatgccctggggcctggccgtcggtgccgcaggagccgtcgccgcctactacgtgctggcgcggttggagagtggggccacccgggcccgacgcgaggcgctgctgggccagcaacccgaggtgctggacctgattgcggccgcacaggaagccggatcacccctgcggcgggcagccggcgaggtggcggcgctggcccctgaaccctccgcctcggtgctgcgtgaggtggacgcgcacctgcgcgtgggcttcagcgaggccgaggcctggcagagcctggccgacgatccggtctggggcagcacggcccgcgacctggcacgcagcgcccgcaccggtgaggcggtggctgacacgattcacctgcatgccaccaggacccgcgaggcccaccgcgaccatctgaacaagaaggcccgcacggtggcagtcaagtccgtggggccgatgatggcgtgcttcctgcctgccttcatcctggccggggtcgtgcccatcttcgtgggaatcgcctcgcgctacctgggatgaaccgacgacgccgcgtccccgcgcggcgggacagcccggtggcagcgggccgtggcgtcgctgaagtgggagcggctgaagtgggagcgggctgtggcttcgctgcgggcccgacgcgggcccgtgtcccggtcagtcgacccggatgccgaatgcggcgagcaggccgggtgcctcgagcgccgacagcttcaggccgcgggtctggttgtcgcggggatcgaagaagtatccgcgcgagccacgcaggtcggcctggcgcaggtccgtgccgtggaagcgtgccccggtcagctcgcagttgcccaaggtcgccttggacaggttcgcgacggtgaagtcggtgtcacgcatcgagcagtcaatgaagcgggcacgcgagaagttcacccgcgacaacgaggcgtagtcgaggatgcagcgctcgaaggtgatcgtcaccggcggcaacagcgacaggccggcccgggaccaatcggcccccacgagcttgcagtcgacgaagcgacaccgggtgaacacggtgcccaccagctgcgcgttggccaggttgcactcgtggaagtcgcaatcctccaacgccgagctcttgagcgtggcgccctcgaggttcacggcctcgaagtggcagtcctgcaggtcggcctcggtgatcagcacaccgggtgccgatccggagagggtctggtcactgagtgcattgccatcggggtgcaggagctcttgaatcgccgtcaccgcgccaagggtacgggcatggcgccggtgtcggcctgccgcccggcgaggtgttggcattgtcgcggccggtgttgtcctgctgagcaactgccaccgggggcgcacacagtcctggtgtcaccgcacgtgcggctgacatcgagaaaggaatggcaatgacatcccagtcatccaccaccatggtcgccacacccgatgtccatcaggacggcaatttctacaccgtgcccgccccggcaccgctcaagccgaagggccgcctggccctggcatgcgatcgggcccgtgggcgcagcctcatcctggcggagcggggcatggccaccgccgaatacgccgtcggcatcctggcagcggtcgccctggccctgtgcctgctcagggtcttcaccgacaacgaattcttctccaagatgctcaagttcgtgacggacctgatcggcaaggccggagccaagatcgagtgatggacgcgaggctggttcggtgatggcggggcgggtgggatacgacggtgggccgtatcccacccgccccgcaccaggagcccgggcacagcaaggttggcaggcacagcaacagtggtgaggaggagtcatgggcacaagggcagggcgtcgcgccgtgatgcacgcagcgcaggccccggcaagcgaatacccgcaccggaacccccggcccggagacgcagtccggcgcacccgcttcggacgtacgcgtgaccgggggatggtcaccgccgaactggcggtgggcatcctgtccgtcgcgcttctggccggcatcttctgctgggtcgttgccgtcatcggggtgcagatccgttgtggtgattcggcggcccagatcgcccggcagacggcccggggcgaccaggctgccgtgcagcgcgcccgtgccggggttccccgggacgccgagatcgacatcaggtcctccgggtccgacgtggtggtcacggtgaaggccgagttgagctggggcaaggtggggccggtcaccgtctccggctcatcgcgggtgacccgggaggccggcgtggaggccggctcgtgagccgcgccgtgagcccgatcgggggtcaccggcgaggggcactggtgactcgcgggccaggtgcccgatgggcgcgccgcacagcgcaccgccacccggtcgaacgccatggggttgggccccgtgtcccggggcgcagcgacgagcgcggatcggggtcggtgctcgccctcatcatcgtgctggtcacctgtgtggtggcgtactggacggtcgtcttcgccggctgggtgggcagcatccaccgcgcccgatcggcggcggacatggcatcgctggccggggcccacgcgctgcaggtcaatggcgacgcctgctccgaggcgcgtcgcatcgccaccagcaatggtgccgagctcaccgactgcacccccacccggggcatcggcgaatatgtcgtggaggtcaccatcgcgatgcccctgacaccctcgttgcccggagcccccagcaaggtcagggagacctccacggcaggggaagtgcagcgttgatcaccggtcggtcggcgaggccgacccgccacgacgatcaggcctggacggaggagccggcacggggagtgggtcaggtccggaaggggaatcggtcaggtccggaaggggaatcgggcaggtccggaaggaaaactggtgggggcccgggacggagccgctcaggccccgaaacgggccacgagcctgctgatggccgccgtctggtcctcgagggaatcaccgcgaccgactgccacgcccaccaggaaggcggtgagtggggcgccggggcgggaggggccgtgtgccacctgcgagatgaggtccagcaccggcttctccgcttcggccgggagcccgtcgtcaaggcccaattcgccggcgacggcggccagccaggtccgcatgcgggccatcgtctcggggtcgtccttgtggtgggccacggtttctcctatcggccgaagatgtgtgcgtcatccttccacggccttggatagcatgaatcttcgaccttggagggcaccgtgctcgacgctgcaacactcgattcgctggcggcggccttcgccgccctggggcggctgcaccgcgaggcccccgacgaaaccgccctgcgcggattccgcgacctcatcgaggactggccattggccgcactcgaacccgagggcaaggattctgccgcaggcccttccaacgcaggcccttccaacgcaggcccttccaacgcaggcccttccaacgcaggcccttccaacgcaggcccttccaacgctgggcttcccagtgccgggcttcccaactcggggtcttcgagtgcaggaccttcgaaccccgggccttcaaacccggcgccggccggtgcggcagctgtcggtgaggccggcacagcggacgcatcgacccgcacacggtggcacggtggcacggatgccggacgcgccgccaccggggcaggcatggaacagatccgggaatcagcgcgtgccggcgagacccctgaggagattcgacgcgaccacgacctgctctacggggacaccgcggcagcccgggtggcgccctatgaatcggtgcaccggggcgtcgacgggctcgtcttcggcgaggcgacgctcgaagtgcgtgccgcctaccaggcgctgtcgctgcaggccccgaagctcaaccaggaacccgacgaccacatcggcctggaattcgacttcatggcccagctgaccctgcaggtgatcgacgcgctctacggcgatgacgcggcgcgcgcggaaaagctgatgacgcacggcaccgatttcctgcgcgaccacctgcttgcctgggcaccacagatgctcgacctggccacccagcacgcacagacgcacttcatgaagggcgtcgtgctgctctcgatcggagccctggacagctacgccgaactgctcgacctgccgttcgagcgcccgtagcggcccggcaacgtgcgcagccggcgcgatgaatgaccaccgggtgggtgaccctgccaggtggatggcctcgcccgggggatggccccgccagttggacaacccgcccggcggatggttccgggcgatgcaccaccccgcacgatgccatccggcccgggcggttgccatggggcgcatcgtggcccggatcgggcgtccggcatcatggggccatgccatcccaccgcacggacaccgacgtcaccccggctgacgccacgcggtccctgttgcggtggctggcggcccacgacctgcccgacgaggtggtgctcacctgcgccgacgcgccggttccagccgtcgccccggacaccctgacggtgcaggtccccgacggtgtggcctcggccggcatcggactgccggcacaactcctggcaatgggcgtggcgcacatcgccatcgaaacctgcagctgccacgagccctccgacgagcaggccccctccgacgagcagattctccctgaccagcagattccccgggacgagacggtgcagcgctggccagcagcgctgaaggacgtcgaggtccgccacccggcatcgaaccctgctgcggaccgtccgggcccggaccacccacggcgacgcccacgtcacctccgacgcccctcgctgcggacacccggcagggcgccgtcggcaggcaccctgcgcctgggcaacgtgccggtcccgcgacgcatggtgctgggcgtggcactggccgggcgcgcccgcctcgacctgtcccgcgcggagcccgaacgcgtccacgatgcactgcgccagctctccgaacagggccgggccgacctgacccggctgcacgacatcgccccgacacccagcccggcccccgtgctgcgcgccgagggctgcgtggcctgcggggtgtgcgtcatgtcctgtccccacggggccctcggccttgccgacggcgacgacgatgggacgaccctgctcatccacctggccgaaaagtgccgcggagagatgtcatgcctgcggctgtgcccggccggcgtcctgaccgcaccggccgcgcaccccgcgccgcagacgccccgggacgaggcatcgccgccgcagaccggatcacggatggatggtggatcgcagcgtcccgtcagccggcaggagcgcaccccgtcacgcgcatccgccaccgacgacgtcccccacattccgatggaacagctggccgaacggccccaccgcgccattgcacgggtcgccaccgcccgctgcgcgcggtgcggcacgcgccacccggcgtcgcagggcacgctctgccccacctgtcatttccgcagcacccatgccttcggatcggcgatgccacccgctctggcgagggcggccggcgcggataacggcgcccaccgtccccgccaatagacagcaatttcacagctgatagcctcgcgccacccggcatatctcgagggatggggacttcatggctggcactgatccgatggctggcacaagcccaatggatggcacagacccgatgactggcactgattcgatggctggcgcaggctccgccgccggcaccacgacagcggacccacagcacacccagcatcacccgtcgcccacccggcgcaccttcctcaagtggtcggccgccgtcgggggaaccgccgcgctggccagcaccgtcaccaacctggggatgccccacggctcgacggcacacgccgccaccgagggcatcgccgacgccgatcgcaccgtgtggtcggcgtgcacggtgaactgcggatcgcgctgcccgttgcgcctgcaggtgaaggacggcaccgtcgtgcgggtgctgcccgacaacaccggcaccgaccagatcggcagccaacgcgtgcgggcctgcgtgcgcggacgctccatccgccatcgcatctacaaccccgaccgcctcaagaagccgctgaagcgcaagcccggcaccaagcgcggcgacgaacagtggcaggagatctcctgggaccaggcgctcgacgagatcgccgccaagatgacccagatcaaggccgactacggcaacgaggccatctacatcaactacggcaccggaacgctgggatccacgatctccaagtcatgcgacgcggacgtctcggcattcgcgcggctcatgaacacctggggcggctacctcgaccactactccgactactccaccaccgagatcaccgccgcctacccctatttctacggctcgtgggtggacggcaactcgttcgacgacgtggccacctcgcacctgcaggtgttgttcggcaacaacccgatcgagacgcgcatgtcgggcgggggacagttgttcgtcacccagcagatgcgcaaggaacacgccgtgcgcaccatcgtgatcgacccgcgctattccgagaccgccgtcgacctggccgatgagtggatccccatccgcccgggcaccgatgcggcgctggtggccggcatgatccacgtgatggtcgccgagaacctgcacgaccagggcttcctcgacacctactgcatcggattcgacgacgcccacatgcccgacggcgcgccggccaacgcgtcctatcgggcatacctggccggacgcggcgccgacggcgtcgaaaagaccccggaatgggcggcctcgatcaccggggtgcccgccgaccagatccgtcgattggcccgggagatcgccctggccaaaccatgcgccatcacgcagggatggggcccgcagcgccaggccaacggcgagaacaccgcccgggcgatcttcctgttggcggccgtcactggcaatatcggtgtctccggcggcggcaccggggcccgggagagcgcccggtcgatctcgttcgtcacgccgttcaacaagggcaccacgaacccgtcgaagaagatcatccccgtgttcgcatggctcgacgccatcgaccacggcgagcagatggacaccttcaatgccggggtgtgcgagaagccggcgtcgatggcccgtgaggcgaaggttcccgttgacgacaacgggaaccccacgaacatcaagctcgatgttcccatcaagatggtgtggcagtacggcggaaattcgatcgtcaaccagacgggcgacaacaacaaatcggtcgagatcctgcgtgacgactccaagtgtgagctgatcgtaaattgtgatatccagtacaccacatcatgccgctattcggattatattcttcccggaacgtctgcggccgaggaggccgatatccatcccggctcgaatggtggcccgatggcatacggaatcatctcccagcaggccatcgaaccgctctacgagtgtcacgacatctactggatctgcacccagctggcccgtcgcctcggcacggagcaggccttcgcccagggtcgcagccgcgaggactggctgcgtgcaaccatcgacgccacgcgggcgaaggtccccgacctgcccgactatgacgactggaagcagaggggcatcttccgcaaggacatgggtccggtcatcgccctggccgacttccgcgccgatcccgtggcgcatgcgctggagacgccctcagggaaaatcgaaatctattcccagcgcctcgcccggatgtccgagaaatgggagtacggcgtctttcgtgacaaattgcccggtgattccctgcaccccctgccggaattcgtcgacacctgggagggtgcgctcgccgcacgcgcgtcacgcgaatatccgttccaggtgatcggccaccactacaaggcacgcacccattccacctacggcaatgtcgactggatgaaggaggcgcaccgccagcaggcatggatcaacatcctcgatgcccgcaaccgcgggatcgccgacggcgaccaggtgttcctctacaacgaccgcggcaccatccgcctggaggccaaggtgaccgaacgcatcatgcccggcgtcatctccgtgccgcagggcgcctggtacgccccgaagtccgccgacgaggtgaagccgccgcccggggcgaatcccgagcgtcccgtggacactgccggctcggtgaattccctgacatcgctgcacccctcgccgttggcgcggggcaatgcggtgcacaccaccatcgccaatgtggtcaaggcctgagggggactgagcaatggctgatgacctgacccggcccggcgccgactacggcttcttcttcgaccaaaccctgtgcaccggctgcaaggcctgccaggttgcctgcaaggacaagcacgacctgcccgtgggcgtcacctggcggcgcgtcgtggagtactcgggcggcagctggcagaccaacgaggccgaccacacggtgacgcccaatgtgttcacctactacacgtcgatctcctgcaaccactgcgaggacccgctgtgcgtgcaggtgtgccccaccacggcgatgacccagcgcgacgacggcacggtgttcgtcgaccagtcgaagtgcgtcggctgccgttactgcgagtgggcctgcgcctacggtgccccgcagttcaacgccgaggcgggccacatgaccaagtgcgacctgtgttacgactaccgccaatcgggtcaggacccggcgtgcgtggcggcctgcccgtcgcgcgccctggagtggggtccgatcgacgcgctgcgggccgcccacggcgacgaggccggcatcgcgccgttgcccgatcccgccatcacccatccgcgtctggtgatcaagccccatcgtgacgcgcagaagtgggaccaggccgatgggcacatcgcgaatcccaaggagatctgatggacgtccatcacctgccactggtgctcttcacggtcatcggacagatgtgcgtgggcaccttcctgtgcctgggcgtgatgcagctggtggtgtcggcccgccatggtcgcgccgtggcgcaacgcatcatcgaaccggtggtctatgcgatcggtccggtgatggtgctcgggctggtggcgtcgatgttccacatgcacgacatcacccacacgctcaatgtgatccggcactggcgcacgtcgtggctgtcgcgcgagatcatcttcggaatcggcttcgccggactgggcttcgcctacgccttgctggagtggttcgaggtggccggcttccggctgcgccaggtggttgcggcgctgacggcgctgttcggcatcgccctggtgtggtcgatggcccagatctactactcggtgccgacgatccccgcctggcacaactgggccgtccccttccagttcttcggcaccacggcggtgctggggccgctggccgtgggctgtgcgctcatggccacggcggcgctcagggcgcggcacgcggcccatgacgtggcgacgcccgcagcgaacccggcccacggtgggcccacggcccgcatccggggacgtatccgcgccatcaacgcacctgccaccgccggcgaatgggcgatcagcacctcggtggtgcgctggctggcactggtggccgccgtcgccgcagcagccgtgctcatctcgtacacgctgtacgtgtccgggctgaccggcggcaacgcccaggcccagcttgctgcgggcgtgttcagcggcccactgtttgcggtgcggctcaccctgctcggcctggccgccatcgtgctggggctgttcgtcttccgcgtcgcagatcgcgcgcccgtcgaccggtcgtggggcctggcggccctcatggccacctgcctggccggcgccttcgtcgccgaggtcatcggccgcttcttccactatgcggcgatgtaccgggtgggcatctagcgctgcgccgggccctccaacagggcggcgagcaggcgcgtcgccgcgtccttgtcgaggtgctggttgccgttgccacacttgggcgacacgatgcacgccgggcagccggcgaggcacgagcaggtctgcagccgctgcagcgtcgccgccaaccaggcctcggcacactcgtagccggcccgggcgaaacccgagccgccggcctggccgtcgtgcacgatgatcgtgcacagctcggtgtcggggtgcaccatcatcgacaccccgccgatgtcccagcggtcgcacggcgcgaagccgggcagcaacccgatggccgtgtgctccatcgcgtgggccgcattcgccagcttgatcgccgacagccccacctcggcggccacgtcctcgggcaccgtccaccacaccgccttggtgcccatccgctgcaccggaagctccagcggattctcgtcccacacctgggtggtcacctcgtcgcgccgcaggtagccggtcacctgggtggtcaggtcgatgtcgccggtgcacacggtggtgcggccgagcggcttgtgggcgtcctcgtgcaggatgcgcgcctcgatgatcgtgcgcggctgggtgaaatagcccggccggcgccggttcaccaacgcttcgcggcgctcgggatgataggcgtccaccaggaactgctcgccctggtgcaggtagaccgcccccgggtagacgctgtggtcggcggcggccatgtccacctggccgatcacgcgcccggaatcctcctcgatgatgtccagcggtttgccgccggtgccgcgcaggtcaatcgcgtccaccgcccgctcgggacgcggccagtaccagccggtggcccgccgacgcagcagcccggccgcacacaactgctcgcacaatcccgccatcgtcgggccgaaccagcgcgcatcggccggcgtcagcggggcctcctgggctgccgcggccagctggggccccagcacatgcggattgtcggggaacaacacggtgcgctcgatcggcgccgagaagatcaactcgggatgggcgaatagataggcgtccagcgggtcctcgcgctgcaccaccaccacgagcgcatcgcggtcggcgcgcccggcccgtccggcctgttgccacaacgacgccagggtgccggggaagccacagatgaccaccgcgtccatgccggccacgtcgacgccgagttccagcgcattggtggccgacaccccgaacagccggcccgactgcagtccggcctcgatctggcgccggtccatcgccaggtatcccgaccggtaggacgcaatcgcccgcccgctgcgcgacttctccttggcgcgcaccgccatcagctcgcactgcgcgcggctggccacgaaggcgatcgtctggcgtccctggtcgaccagtccggccaggatcttcgctgcgtcgtcgtaggcgctcgactcgggacgccacagcaccacgtcgcgtgccggatgcggcgaggcgtcgtcgttgacctccgcgatcggctccggctccccgatcagcgccgcaccggactccccggcatggctggccgtggccgacgcgagaatgaacgccggatcggagccgtaggcatggcacagccgtcgcagccgacggatcaccccacccacctgggccccgaagacgccgcggtagcggtgggcctcgtcgatcaccacatagcgcaggcccgacagcagccgcgcccagcgggcatgcccgggcagcagggcatggtgcaccatgtcgggattggtcagcaccaggtcggcctgttcccgggcaaagcgacgctcggccgcgtcggagtcgccgtccaggcagcccgcctgccagcccttcgggccgaaggtgcgggccgcgcgcatctggtcgtgcgccagcgccttggtcggcgccaggtacagggccgtggcgccctgcttgaggcccagcgccgagcgtgcccgcgagaccgtggtggcccgggcccgcgatcccaccatcgcctcaccggacaggccagcaccggccaggcctccaccggacagtcccggatcgaggcgatccgccgacagcccgtggtcggccaccagtgcagcggccagcccacggttggtcgacggaccccgccgatcgccctgcgccgcatcggcccactcgaacccctccgcggcggcacccggtgcggtcgccgccatgagcggcagcagataggccagcgtcttgcccgacgcggtgggcgtgctcagcgccacgtggcgtccggcgtgggccaactcggccgcctcacgctggtggcgccagggcagcggcaccccggccgcgcggatcgtggcgacgcagtccgccgacagccactcgggccactcggcagtggttccgggcagggcgtcgcgatggtccacgtgcaacacgcacgggtcgcccgccagccactgcggaatcgccacgttcgtcctccccggtggccgcggccacgcattgtccagcaccactcttgtgcagcagcgctctggtccagcgccgttctcccgcgacgcagcccgggcgggcacggcgcccgccagcacggctcccctcaattgtgccgcgccccactgacacttctggtggcatgcccgggaggcacgccacccggggcgtccacgtggggtagtgggcgtacccccgggcacgccgtgagccgtaggctgggcgccatgacgatgcgccaacacgcagtgagcgacgatttcctgcgtcccgacagcatcaacgccttcactgacgccctgcgcggggcgaagtacaacgtggacgcggtgctggaacgtctgggcgaggccggccaggagggcctgacgcgcaatcagacgatgcccgcgctcgaccggctgggcgacgccaccgacgcccaggccgacctgatccggctcttcccgctgcaacagatcgtgccgcgctcgcgactggcggccttcctcgacgtgccggcgctcatcgaggccggcgtgctgggtgcgatcggacgcgagggcatccacgccgacatcgacgtgcgtccctatgggttcaccgacgccgccggcgaatggagcggctgggtggcggccgacccgatccccgggatggactcgatcgtcacccgcacccgtcccaactacgtgctcggcgtcagcccggcgtccacctcgctggcccagctcacggtgcccgaccgggtgggctcggcgctcgacctcggcgccggttgcggggtgcagagcctgcacctggcccgccacgccgacacggtgaccctcaccgacatcaatccccgcgccctggacatggcccgcctcacgctggccctcaacgggctcgacctcgacgtgcgcgcgggcagcttctacgagccggtggcccacgacagcttcgacctgatcgtcaccaatccgccctatgtgatgagcccgcccaccgacgccgccgaccgcctcgtctaccgcgagggcggcttcgccggcgatggcctggtgcggcacgtggtgcgcgagggcgcgagccacctggccgacggcggcctgctgcaggtgctggccaactgggccgacacgcgcgaggcgagctgggaggaccggctggccgaatgggtgcgtggcaccggatgcgacctgtgggtggtggagcgcgagcacctcgacgtctattcctatatagagatgtggctcaccgacgccggcctgtcgggcgatccgatctggctcgaccgctacgccgaatggctcaactacttcgacgcccagggcatcacgggcgtcggcctgggctggatcatggtgcgcaagtcgggctccgccgaacccagcgtgcacatggagagctggccctacacgatcgcccagcccgtcggcgccgccctgtcagccggctggaccgcacgcgacgtggccgggctggacgacgacgaactgctcgcacgcaccttcaccgtggacccctccgtggtgcaggaggccaccgggcgtcccggggcggccgatcccagccatgtggtgctgcgccagaccgccgggctgtgccgggcgctggccgtggacgccgcggtgggtggagtgatcggcgcctgcgacggcgagcttcccctcggcgtgctgatcggggcggtggccgggttgctcgaccagccggtcgacgaactcgaggccgccatcctgccccgcctgcgggaggcgatcgagcagggcttcatcgcctgacggcccccgggacggagggccatggggcgccctcccaccgtcggccccacaccgccctgcacacagcgggtaccgatgagacacccccggtgtcccttgttcgggcgtgcactgtagatatagggcactgttgtgcagtaacgaacccgacagcgcctccccgcaccgcacaggcgctgtggggaacgggggagcaggtgccgggagcaggtgcccgtcaaccccggccggggtcaggcgctagcatcttgggcgtccggcccgttgccaggtccgccaaccccagatccggcagcacccgcttgtcagcaacaccgcaacgaccaggccccacgagacccaagacctcgtgcccgcagcctcatggggcacgcaccacacgcacgaaccaaacctgaaggaacaccgtggcaactactccgcgcagactcgtcatcgtcgagtcgcccaccaaggcgacgaagatcgccggctacctgggccccggctatgtcgtggagtcgagccgtggccatgtgcgcgacctgccgaccagcgccgccgaggtgcccgccaagtacaagggccagagctgggcgcgcaccggcgtcaacgtggacgacgacttcgcacccatctacgtggtgagcgccgacaagaagtccacgatcaagcagctcaaggccgagctgaagaacgccgacgagctctacctggccactgacggtgaccgcgagggcgaggccatcgcgtggcacctgctgcaggagctgaagccgaagatcccggtgaagcgcatggtcttccacgagatcaccccggccgccatccaggaggccgtcaagcatccgcgcaccctcgacgaggacctcgtggaggcacaggagacccgccgcatcctcgaccgcctctacggctacgaggtgagtccggtgctgtggaagaaggtcatgccccgcctgtcggccggacgcgtgcagtcggttgccacccgcctgatcgtcgaccgtgagcgtgaccggatggccttccgggccgcgtcctactgggacatcgaggcgatcctcgacgccggcgcctccgccacgccccgccagttccccgcccgcctggtgagcctggacggccagcgcatcgcgcagggttccagcttcgactcgctgggccacgccaagtccgacgtcgccgtgctcgacaagccggccaccgatgccctgtcgtcggcccttgccaccgcgccgttcgtggtgaccgccgtcgaggccaagccgtacacgcgtcgccccgcggcgcccttccgcaccaccacgctgcagcaggaggccggtcgcaagctcggcttcaccaccgatcgcaccatgcgcgtggcccaggagctgtacgaggacggctacatcacctatatgcgtaccgactcggtgacgctgtcgggccaggcgatcaccgccgcacgggacgcgatcacccagctctacggcgccgactacgtgcccgagcgtccccgcatctacaactcgaaggtgaagaacgcccaggaggcccacgaggcgattcgtccctccggtgagcacttccgcacgccggcccagacgggcctgcgcggcgaccagttcaagctctacgagctggtctggcagcgcaccgtcgcgtcgcagatggccgacgccaccggtcagcagatgaccgtgcgcatcgaggccacgcccacccagcgggtcgcattggagggcgtgacgccccagccagtgcgcaccgcacagttcaccgcctcgggccgcacgatcaccttccagggcttcctgaaggcctatgtggagtcgagcgacaagcccgaacaggcccaggcgaggctgccgcagctggccgccgagcagaagctcgatgccgccgcgatcaatcccgagggccacgagacgaagccgccggcgcgcttcaccgagccgagcctggtggccaagctcgaggagctcgacatcggtcgtccgtcgacctatgcgtcgatcatccgcaccatcaccagccgcgactatgtgttcaagcgcggctcggcgctggtgcccacttggctggcgttcgccgtcacccggctgctcgaggagcatttctccgagctggtcgactatgacttcaccgcggcgctggaggaccacctcgacgagatcgccaagggcgacgccgaccggctggcggtgttgcagtcgttctacttcggcaacaacaatgccgacgcccacgagggcctccacgagctcacgaactcgctgggcgacatcgacgcccgggcgctgtccaccttccacctgggcgacctcgactccggcatcgacgtgcgcgtgggccgctacggcacctatgtgcaggacgaggaggagcaccgcgccaatgtgcccgaggacatggctcccgacgagctgaccgtcgaggcggcccgcgagctgctggcgcacaccggcggcgatgagcgtgagctcgggctcgaccccaccacgcacctggcgatcgtggtgaaggcggggcgtttcggcccctatgtcaccgaggtgctgcccgacgacgacgatgcgcccgcagcgaagaagtcgaaggtcaagccgcgcacggccagcctgttccgcacgatggatccggccacggtgacccttgacgacgcgctgaagctgttgtcgctgccgcgcgtggtcggtggtgagggcgaggagcaggtgaccgcccagaacggacgctatggcccctacctgaagaagggttccgacacgcgctcactgcccagtgaggagtcgatcttcaccacgacgatggagcaggcggccgaattgttcgcccaaccgaagaggcgtgggcggcaggcggcggcccccttgcgtgagctgggcgaggacccgaattcgggcaagccggtggtggtgaaggacggccgtttcggcccctatgtcaccgatggtgagtacaacgcgaccctgcgcaaggctgattcggtggaggcgatcacgctcgaccgcgccgcagagttgttggccgagaagcgggccaagggtccggcgccgaagaagcgcaccacccgcaaggcgacggcgaagaaggctccggccaagaagacggcagctgccaagaagccggcagcgaagaagccagcggccaagaaggctacgtcctcggcgtccaccgccaagccggccgcgaagaagccggcggcgaagaagtcagccaccacgtcgacgaactgacctgcgccggcgcacccggcgtcgcgggcgacaaggagcgagcatgtcgaagaagcgggccacctggtacttccagctgccctggcatgtggaatcgccgttgctcaccgacatcggcctggcgctcgaccgggtggtgccccgcgacccggagcacctgccgcccgccacggtgaccctcatggacaccgccgacgagcgcctgcagcgcgccggggtgaaggtggcccagcagagctatggtgaccacggcgagtggttcgtctggggtccggactggacgccgtggctgccggccgaacgcgacgacccggtgggcgtggaggccgagctgcccgacgaggtggccgacctgacccgccccttccgtggacgcaatgccctgcgtcccgtggtggtcgccacccggatgcgggtgcgctacgcggtgatcgacgaccacggcacagtggtggccacgctgacctcagaccggatcgtggtgcgtcgccggggcgtggccgccggccgcttccgccaggtggcgatcgacgtcgccgggctggacccgcagcgtcgcgccttcatcatcgagcgtttcgaggccatcggcgcgcagcgtgtcgacgcgctgccccatctgttcgagcaggcggtggcggcaagccgcgacgatgccctgcccggtgagcgcccggccggcggcagcctcgatgccttcgtcggatgggtgctggcccgacgggcgcgcgaggtgatcaccaacgacctggcactgcgcagcggcgaggtgggcgacgccaccgcgctggtggtcgcactggccggcctgcgcgacgagctcgaggccctgtcgggcctgctgcaaccggcctggcgtgacgagcaattgcgccggctggacgccctgggccccgatcccgatggccatgtgctcgcccatgacgactacctggacctcttggacgccctggaggcggccacccgcacgccgccgttgacggtggacggcgccaccgccgcccgtgccgtgctgggggagcggctgggcggtgaccggctgcgcctgatcgggcatgtcgacgcgctgatccgcggcgacctggtgggaggtgacctgatgggccgtgaccaggcgcgcggtggcggctcgcagtcgatcacccgcaaggaatggatgcgtgccctcacggtcggtgagcaggcgctccagctcaccgaggtggccggggtcctgttcgggcggcgcaagcacatggtgcggttgctcggcaaggtggtggcggcgctcagtgccgcccgcccgccggagggcctcctgtccgacgacgagatcgccgagctgagtcccgcccaggcctatgcggccggccgggccgtggagcgcgggctgcaggtgaccggcgcggagcgtcgctacctggtggaccactggcccacctggcgggccaagctgctcgcgctgaccttctcgtccaacaagccgtccgcgtcgggggaccaccgatgagcacacggcgctatccgggatggttcgtcgtcttcgagggcggcgacggcgtcggcaagtcgacgcaggtcgagctgctggccgacgcgctggccgacgcgggggtgtcgcacctggtcacccgtgagccgggcggtacgccccttggcgacaacattcgtgagctgttgctcgacccggcgagcggcgacgtcgccccgcgggccgaggcgctgctctatgccgctgacaaggcccaacacctccatgaggtggtggtgccggcgctggccgcgggcaaggtggtggtctgtgaccgctatctcgactcgatgctggcctatcagggggcgggccgggtgctggagctgcgcgaggtggccgacatcgccgactgggccacccggggcctgcgccccgacctcaccgtgctgctcgacctcgatcccgacgaggcggtgggcatgaaggagcacaaggaccgcctggaacaggccggcgtggagttccatcgtcgcgtgcgccagggcttcctcgacctggccaacgccgatcccgagcgctacctggtgctgcccgggcggcagggacgcgaatgggcggccggccgggtgcgcgagcgactgcggggcctgggtgtgcagctgatcggctgagttgcgcccgggtgggccgggcccgtggggtggatcgtcgccccggattgcggacgccgccgcctgcgggtgccgattcctgtcagggcaggtggcactatcgaggggaaccccgagttcggcagtccagctcagcaggtcggggctagtagggcggggctagtagggcggggtgggcgcaggtcggggcaatgaccggtcaatgatcagcagtacagggatccaacagttcagggggcgcaatggcaggccaggagatctccgacgccgaggcgcgcgtccgggccgctgcggccgtggcgcgcggccagatgctgcccttcgacccggcccatccgctggtcggggtgtggtccgacctggtgggccagcagcaggcggtgcgcgtgctgcgtcgcgccgtgatcggcgccgaggccgccgaggccgcccgggtccgttccgcgtcgggtgacgcggcagccgtggacggcgcggcaccggggcacgccatgacccatgcctggctggtcaccggccctcccggctcgggtcgctcgaatgccgcgcgggccttcgcggcggcgctgcagtgccgcttcgggggttgcggcgagtgcaacgactgccgtactgccttgtcaggggcccatcccgatgtcaccctggtgcgcaccgagatgctgtcgatcggcgtcgatgaggtgcgtgacctggtgcgcaaggcgtccatgagccccacgatgggtcgccaccaggtgatcgtcgtggaggacgccgaccgcatcaccgaccggggcgccgatgccctgctgaagagcctcgaggagccacccgccaggaccgtgtgggtgttgtgcgcgcccactcccgacgatgtgatcgtcacgatccgctcgcgcacccgccaggtggcgctgcggacgccgccgaactccgatgtggtgcggctgttggtggaacgcgaccacattgaccgagccatggccgaatatgcggccaaggcggcccagggccatatcggccgggcccgggcgctggcgcgtgacgagaaggtgcgcaatgcgcgccatgccgtgctgctggtgccctcgcggctgaccagcgtgggggcctgcctgacggtggccgacgacctggtgaaggccgccgatgcggaggcggatcgcatcaccggcaggctcgacgaggccgaccgggcgcggctgtccgaggcactcggcttcggcacgaagggtgcgcgtccccgccatgcggctgcggcgctgcgcgacctggaggaccagcagaaggcccgcgccaagcgggtgcgtcgtgacgcgctggaccgcagcctcaccgagctgaccacctggtaccgcgatgtgctggccgtgcagaccggtgccgtggacccctcgggcctgcattcggccagtggcgtggtcgagggggcgctcgatgagccgccgacccacacggtggggctgatcaacgccgagatgcgcgccgatgtggcacgtgccgccgttgccaccacgccggagcagacgctgcacagcattgacgcgatcctcgagtgccgccaggcgttggagaccaatgtgaacccgttgctcgccatggaggccctgttgttgcaactgggcaccgcgacgcaatcctgacgcgggctgcggctgtgggggcacggatcgtgtccgggggcgtgtcaccggcggccggggcggcctcgggcgggaaagatgggctgtgaagcagtctgaccattttgtctgacagctcggactgcaccagcacgagaggatcaacctgtgacgacgagggacaagaaagacaacctctacgacagcgtgagcgaacccaccgacgccgcacagccggcgcccgagccggctgctggccagggcggtgccgctcccgtgccggacgccacgggaacctccacgcccgcaggtcagcccgcgacggacgcgcagccggttgcgcccgcagcgccgtcggcagctgatgcgacggctcccctgacccagccgggtgcccagcccggccccaggcccgcgtccaccgacgcggccggacagcccgatgccgcagcgcaggccgcgcaggccgcgcaggccgccccggcggccaccgaccaccaggcgcccggcttccatcccggcttcggtgcggtccccgcgccctcgccgacccaggccgccgaggccacgggcatcggtcagacgaaggcggttcccttcgtgtcgaaccaggcgcccgctgcccagagccccgcaggccagactccggcgggccagaaccccgcgagccagactccggcgggcccggcccagccgacgcccgcccagcccgcaacgccggtcccgggcgcaggaacgcccgcacccgccgcgccgcaggcccccggttccggtgccaccggaacccagcccgtgtcggcagatggtgccgcgcagccgccggcacgccagttccccacgtcgatggccggcaccgtgccggcaccgccggcccccgtcggcggtcgtggcgtccccgatttcagcgcacccgatgcgggtccccgccccggcttcatgacggcggccgagctcgccgcacgcgacggtgccccgggttccgccgctgcgaccggtcagggtgccgcgtccggtgaggccgccgtgcccgccggatcggcgacctcgtcgttcctgcgcaccacctctgacagctccaccgagcgcagccagcaggtgaccaacgaggcatccagcgctgccgcgagcgtgtcgtcgatgccgaacatgcccgtggtcgccgcgtccacggtgttcggcgccgacctgagccacaacagcagcgcgcgcgacatggccgacaccgcaacccagaagcccgtgatcgacaccgccgcggccgaccgtgagcgcaaggcccgcgaggaggccgcccgggtcaagcaggaggaggccgcccgggtcaagcaggaggaggccgcccagcgtgcccgcgaacgggcggcacgcgagcgtcgtctcggcacggtggcccaacagccccaggagccgttggtgatcgagaagccgcagggtcccagcaccgacaagttcgcgccggcgctcggcctgttcctgatgcgcctggtcactgccgtgatcatcggcgtctacggctaccagatgctcaccgagcgccagcccgtcgtcgatgccctggtgagcatcggcatcccccgcgctggcatggtcacctgggggctgtcggtgttgctactggtgatggcggtgatgttcgtcttcggcttcggcgccagggtggccggggcgctcaccacggtgttggcgggcctgacgatcgccttctaccgctggggcgatttcaaccccttcgtggcgggcacggccggcttctccggtgacatcgaactgctgctcgccggcatcggactcgtgttcctgctggtgggagccggcggctggtcgctggacggcggcatccgccgctcgcgcgtgcgccgcaagcaggaagccgaattctgagttcctgaccggcgttgccccgcaacgtcatcgtgacccggcccggtgctccccgatggggacgccgggccccgtcatgtccggagccgggggtgaattcggccgggcgcccgggatagtgttcgggccatggcgagcgtcctggcggtggagttccagccgcacggccagctgcactacctggcggccggcggccacgagcacgccatcggcgatcaggtgctgtaccccaccgaggacggccgcgaggtggcccgggtggtctggcgtggcgacgtcgacctgcccgacgcggtgccggtgtgtgccggggcggcgacccccgccgacctggcgcgcgacgaggccaaccggcaggtgcgggccgatgccgccgaggtggcgcgcctgctgatcgaacgccacgggttggccatgaagctgctggccgtcgacttccttgaccagtcgtccgactacgaccgcttgacggtgttctactaccaatcgcccgagcgggtggacttccgggcgctgttgggcgacctggtgcgtgcgctgcgcagccgcattgacctgcgtcaggtgggggcacgcgatgctgcgcggctcaccgggggagtggggccctgcgggcgtccgctgtgttgctcgtcgatgttgacgctcgacccggtgtcgctgcgcctggcacgcgagcagggcatgctggtcagtgccgtgcagcgctgcggggtgtgcggccatgcgatgtgttgcctgcgctacgaacagcaggcctacgaggacttccatgcccgggcgccgaaggtgggcaccacggtgatgacgccggccggtgagggcacggtgatcggctatcaagtgcccaatgatgccctgctggtgcgcacgcgcgacggcgaacagtccagctgtccgctggcgcaggccagcgcctgccagtgcgctgcggcgacgccccgcaagaagaagaaaccgcgtaccaagcggcgccgtgccgacgcggcggtgcccaatgtgcccggcgctgccggggcggctccgctggtcgacgggacgggtgcgggtaagacgtccggcacgggcggacccaccggatcggcagatgcgtccgggacgggtggtccggccgggagtgacgacggtgccggcccctcgcgtccgaccgctgccagcgacgccggaacggcgcaatagtcgcttcgccgacgcaggattcgcccgaattccgcgatggtcggtatagtgaacgcgctgcgcaagcggcaggccgtcttagctcagtcggtagagcgacgctctcgtaaagcgtaggtcacgagttcgactctcgtagacggctccgaagaaacccccggtcgggatcccgaccgggggtttcgccatgccggggcgctgcccgccgggaccggccgcggcgacccgccccgtgacgacctgacctatgacgtcctgcccctcgatggcccgacccccacgatgaacgacgacaggggccccggccggtcgtcaccggtcggggcccctccatcgtcaccagctcggctcagctcagcccagcggacgctcctcgtacgtccccggtgccgtgggctggtgcgatgcgcccggcgtcgcgtcctcgagcgcgtcgtccgggtggtcctgggccggagcgggggagcgccgtgccccaccggcatctccccgggccccgtccggctcgtccgcgccggcccgacgcccgtccccgatctcgctgagccgtccgtgggcgatgcgcagccgacgctgcgcgctggccgccacccgcgagtcgtgggtgaccatgatcaccgtcagacccattgcgtgccagctggaatgcagcagcgccaggatctcgtcgcgcatggggccatccaggtttccggtgggctcgtcggccagcaacacccggggacgcttcaccagcgcccgggcaaccgcaacccgctgttgctggcccccggacaactcgctgggcaggtggtcggcccgatcgcccatcgccacctggtcgagcgccgcccgcgaacgttccaggcgttcctcggcgcccacgcccagcggcaccagggccgtctgcacgttctccagcgccgacagggtggcgatcaggttgaagttctggaagacgatgccgacgcgttcggcgcgcacctcctgcagccgtcgctcgccggcgtcggacaactccacgtcgtcgagtgtcaccgtgccgctggtgggcacgtcgagcgcgcccaacatctgcagcatcgtcgacttgccaccgccggtgggcccctcgatggccaccatctggccgtcggggatggtgatcgtcacccggtcgagcgcggtcaccggatgcttgccggcataggtcttggtcacatcagtcagggtgtacatcactccacgctcctcagggcttcggccggacgcattccgcctgcacgccagcctccgatcacgccggccagcaggccgccgacgagcgccgccgccaggccgatcgcgatcatctggatactcaccgggctgtgcaacaccacgttcacggcattggacgcccgctcggccatgccaccgcccccgcctgcgggtgcgccaccggcctgtccgccggccatgctcggcatcccggagggctgcccgccgggtgcgccgcggccacctcccatcgagaagccgccggtcgagcccgacagggtgatgcccatggcgttgatcaccagggtggcgaccaggccgagcacgatgcctgccgcgcccccgatgcctgcgactcggtggccacctggcccacgatgcgtcgccgcgaccaacccagcgccttcagggtgccgaagtcacgcgtgcgctggttcaccccgctcaccgtgaacagcacggccaggccgaaggccaccaccaccacgccgatcgacagccaggtgcccagcgagctgatcagcttcgacgccgagccgagcgaaccgctcaccgactgggccagcgcctcctgggtcgacacggtggccgacggcagcgccttggtgagcgctgaggcgaccgtggacacctggttcgagtcggaggcctgcaccaggatctcgctgatcttgtcggtgttgtccgacagcgcctgcgccgtcttcagcggcaggtacacctccgagatgctgctcgacgagctcgacgtgacgatgccgaccacgctcacgtccttgttggccaccgagatggtgccgccgaccgccacattgtgctggctcgcatagtcgctcgacaccagggcgacgtcgttgccgtcgtcgctggtggccagcgcgcgtccactgctgacgctcaatgtcgacaggggcccgagcgtcgcgccgggttcaacgccggtgatggtggtctggttgaggttcatccggccaccacccatcgcgccgcggctggttcccgagctggccgacgccgagggcgaggcactggccgatgacgagctgcccgatgaactggatgatgcgctgcccgacgagccgatctggccgtcgaaggtggtctgctcgaggttcagcacggcggtggcgccggccacgccctgcacgccctgcacggtggccagctgcgaggcgtcgaaggcctcggtgccccgcgtggtgcgcacggtggtcgacgacaccgaggtgttgccgttggcgtcctgcgcgccgggggccatgtcgaagccctgcccgggctgttgggtcgatttctgggtcaccgtgatgtcggtgcccactccgtacacggaggacagcacctcggactgcgcccggctcacacccgacgacacggaatggaccaccatcagtagtgccaccgcaatggcaaggcccagtgcgacgatgatcgtctggcgtcgccgcctgcctagttcgcggcgcgccaaggtcatgagcatgcgcgtgtttcctttcttctgggggacgccaagcagcctcgtcccaccagctgttgcacggctgcaaggtcgctgtgatccgtgtatggcatgcgttgtcacggcgtgattgcacgccggcggattactcccacaggtgacaactttgtgacagttgccactatttttcggattccccctgcgggggttggggtgacatgtaatgtgcgccgggtcgggggcagacaggcctggccccgaatccatccgggaaggcgtgatcccatgagtgaaaccaacgccgtcgtgtcggatcgctaccatggcgatcaggacaatgacgatcaacacctgcaccgagccctgggtaaccggcacgtccagctgatcgccattggcggcgccatcggcactggcctgttcatgggttccggcaagaccatccacaccgcggggcccagcatcatgctggtgtacctgatcatcggcgtcatgctctatttcgtgatgcgggcgatgggcgagctgctcctgtcgaacctgaattacaagagcttccaggactttgccgccgacctgctgggtccctgggcggggttcttcgccggctggacatattggctgtgctgggtggtcaccggcatggcggatgtgatcgccttcaccagttattgggatttctggttgaagaacgagacctggtcgatcatcctgtcggtggccacgctggccctgctgttcgtgctcaacctgctcaccgtgcgcctcttcggcgaattggagttctggttcgcgctgatcaagatcgtcgcgatcctggggctcatcgtgttggccgtggtgttggtggtcatcggcttcaccgcccccgacggcgtcaaggcctcgctggccaacctgtggaatgacggtggcgtcttccccaagggcatgaacggcttcctggccggcttccagatcgccgtcttcgcctatgtgggcatcgagctggtgggcaccaccgccgccgagacgaagaacccgctcaagacgctgccgaaggccatcaacgcggtgccggtgcgggtgctcatgttctacgtcgtggcgctggccgccatcatgtgcgtcacgccctggagccaggtgaacccggcggtgtcgccgttcgtcaacctgttcggcctggtcggcttcggcgccgcggccaccgtgatgaacttcgtggtgctcacctcggccgcctcgagcgccaactcgggcatctactccacctcacggatgctctacggcctgtcgcacaagggcatggcccccaacgccttcggcaggctcacccgccacggggtgccggccagcggcctgttcgtcaccgtcgtgctggtcagctccagcctgctgctcaccatgtcgaactcggtgatcgaggccttcaccctggtgaccaccgtctcgtcggtgctgttcatcttcgtgtggggcctcatcctggtgagctacctgcgctaccgcgccaagaggcccgatctgcacgcctccaccacctacgccatgccgggcggacgcgtgatgtgctgggtggtgctggccttcttcgcgttcgtgatctgggtgctcacccagcagcccgacacactgaaggcccttgtggtgacgccgatctggttcgtcatcctggcgatcggctggttcgccgtgcgtgggcgtgcccacctggacgacacgatcacccaggagttgcgggccgagaagggctgagttcgacacccggttccatcctccgggcgataacaggcggcgggttcggcacgcagtgcgtggccgggtccgccgcctgtgttcgtgtcaccccgagctcggcggtaacgcgtcggctctgtagagtcagcaaggaggccatggaggcctggacgcatcgagtgggggaagcttcgtgcttgattgcctgatagtgggagccggtttcggcgggctcaccgtcgcaacgcagctggtccggcgcggccatgacgtcatggtgttggaggcccgcgaccgcatcggggggcgcgtcgacaatgcgcgcttctccagcggcgagctggtggagcagggcgggcagtgggtgttccccaaccacgaccgcatgctcgagctgatcgacgaggccgctgccgcaaccatgccggccaaccccggcaagctgctggtggtgcagcagggcgatgtgcgggccgtggagcagtcacccgacgagcattcccaccgcactcccttcgccgccgccgacctgggccagggcgtgctgcggctgcgccggctggccgagcgcaccgtcagtgatccggcttgggcgggggccaacaccgcctggctcgaccagccgatggaacgctggctcaccgccaacctgcgcaccccctcggcgcagcgcgacctgcgcggggccctgcgcgccgtggtgcacggcccgctgtccgacacgacgctgggcgatgtgctcacccatgtgcgtgccggcgtcgacatggagaacctgatcgccaccaatggcgacatcggccaggtgcgcctggtggacggcgtgctccagctggccgaacggatggccgcccagctcgagggcagggtgcggttgtccactccggtggtcaccatcgaccaggaggacgacgcggtggtcgtggtcacctccgagggcgagcagatccgggcccgcaccgccgtgctgtcggtgccgccgtggctggccaaggacctcgtgtgggcgccgcagctggacccctggcgctacgagaccgtgcagaagaccccggccggggcgatcatcaagtgccacatgctgttcgaacccccctggtggcgcgacgccggcctgtcgggccagatggccgccgacgacggtccggtgcgcgtcaccttcgacacctccgatccggccagtgagcgcggcatcctgatgggcttcttcgagggggccgaggcggccaccctcaccaagttctccgccagcatgcgcgagcgggtcttccgtgacgcgctggtcaccgttttcggcgagcaggccgccacgccgctggaatacctcgaccacgactggggtgccgatccgttcacgaagggctcccatggcgcccatttcgcgcccggactgtggagcgtgaccggccagcagctgggtgcgcgcttcggacgcgtccacttcgccggcgccgaatacgccagcaagttcaatggctacatggagggtgcggtgcgttccggcaccgacaccgccgcccaggtggtcatgcagctgcacgggcagtagggcgctgctggcgggcaggacccgtcggccccggccgtccgtggggcccatcgtgggtcgctgtgtcgggccgcgcccggcccctgttcaccggtttccttgggggcactccccgggcggacacggttgctgtccgggtgggcatccctgggtggacgtccttaagtggacacctgtgcggcaatgacgccgcacaactgcccacccagtcgtgatttccgggtgcggtgagttcgggccgagtgcggccgacggcgtccccctgtccacgggttctctcctccagttctccacccagtggagggttgtggtgatcagacgcgtcgaaaccatccactcagtgccccgatagggccgtcggcgcctggtcgacgcgggatggggaggacctttacgtcgtctaccctgcagaggtcctccccatctttggatcgcgcgtcggcgtggccctgccgggtgcccgtgtcgccggctcggtccgtcaccagctccagctggttcgccccttgaatgggcacggttgcctttcgggtggacgtccttaggtggacacctgtgcggcaatgacgccgcacaactgcccactcagtggtgatttccgggtgcggggagttcgggccggctgattccgtgtcggctgatgctgcggcgctgcgtgaggccgtggcgctgcgtgagcccgaacccgtcccacacacacagttggcccgtcctgatcaatcaggacgggccaactgctcatgtgatcgcaaggaaacgatcgggggtttatgtgtgcaatgcccggcgcacgcgggtgacggtggtcatcacagggcctcggccccgcgctcgccggtcctgatgcgcaccacgtcctccacggtggacgaccagaccttgccgtcgccgacattgccggtgcgggccgactcgcagatgatcgagatgatgccctccacctcggcctcggcggccaggatctcgatgcgcaccttggcgatgaagtcgatcgtgtactcggctccgcggtagacctcggtgtgcccgcgctggcggccgtagccgctcacttcggagacggtcattccggaggcaccggcctgggccagggcgatctcgacgtcctccagcacatcgggctggatgattgcggtgatgagcttcatgcggaggcctcttcctgggtgcgggcgggcttgtcggtgaggctcgaggcgtcgggcggcacgatgatcgtgcggcgcacgctcttggtcgacgagtagccgatgatgctcaggtcgtagccgatctcggcgtgctgcgagatgtccatgccgccgtactccacctcattgctgacgcggatgccgatggtcttcttgatcaccagcgcgatgagcgagctgacgatgaacgagaaggcgaacatggctaccgcgccgagggcctggcgtccgagctgctcgaatccgccgccgtagaacaggccgttgatgccgttggtgaggtccgccttgcagaacaggccgaccgccagggtgccgatgatgccacccaccaggtgcacgcccaccacgtcgagcgagtcgtcgtagccgagcttgtacttcaagcccactgcgtagcagcagccgacgccggccaggacgccgatcgccagggcgcccagggggctcaccgtggcgcaggcgggggtgatggccaccaggccggccaccacgccggaggcggcaccaaggctggtggcgtgtccgtcgcggatgcgctcggtcagggcccaggcgctcatggcggcgcaggtggcggccagggtgttcgtccaggcaagggaggcggtgccattggcgccgagtgccgaaccggcgttgaaaccgaaccagccgaaccacaggccggccgcgccgagcatcaccagggtgaggttgtgcggacgcatcgggcgggtgccgaagcccttgcgggtgcccagcacgatggccagggccagcgctgccgcgccggcattgatgtggatggcggtgccaccggcgaagtcgaagaccttcagcgagttggcgatccaaccgcccttgtcggcggcatagccgtcaaacgcgaacacccagtgggcggccgggaagtagaccagcacgctccagaaggccgcaaacaggcaccaggcgccgaacttcatccggtctgccaccgcgcccgagatgagcgcgacggccaggatggcgaacgcggcctggaagccgacgaaggcgaaggccgggatggtgccgaactgggccgtggccagccccttcaatccggcatactggaagggattgccgatgaggccgtgccacgagttgccgaacgcctccgagaagccgaacaacacccacagcacgccgacgatgcccatcgcgatgatggacatcatcatcatgttcaggacgcccttggccctgaccatgccgccatagaagaacgcgagcattggcgtcatgaagagcaccaacgccgcactgatgagtacccaggccgtgtcgcctgcgctgatttccaatgcgatcatgaaaatagtttttcccggccgcgtttcgtcacagtgttgtccgtgttacgggctggtaaccgatctcggggcgatgtaacagccacgtttcgccgggctgtggacgcgcacgcccgcgcgctgtgtgcttgctgcgcgtcccggaggacgcaccggtgccctcagcagtgtccgccgtcgaagccgaccgccccgaagtagacgcgcccggccaccgcatcggcggcggccttcacatcgtcgagcttgtccctggcgccattgaccaccaggccgacgccgatccggtcgccattggcgttggggatgatcgccatctggcgcaccaccggattgccgttgtcgtccacgccatcggaggtgcgcaggtagctgtccaccaccgaaccgaagccgtaggcgtggtcatcgtcgaaatagtgcatgcgtgagacggcataccaggcgtccgacgagcaccacagctgtccggccatctgcgcctgtggggccaccggccagtcggtctggctgaatgccggcacgtcctgacgggccgtgctggtggccaccgtggtgttctggtcgccgtaggcgcgcaggaccgcattggtcctggtggcggcctcctcgccgttgcccaggaagctgtagagcgcctcgtctcccgacaggctcgacccgctgatgctcttggccagcaggtaggtgatgttggagggcaccgggttcaggttgagcaccgccagcgcgatgggcaggtcgatggtgcccagcgccggcccgctggtggcgctgccggccgtccaggtggcgtcaagttgggcgcccaccggggcgatgcccgacacggccagcccgacgcgcacgccgtagcggttctcgatggcggccacctgcgcctgcaggtcggccaggtcctcaccggtcggcgccatcgtctgaggcgccaccaccggggtctgggagacgctcggggtgaagcttgccgaggggctgacggtgatcgccggctgggcgggacgtccggtgctgcggaacgagccgaaggtgatcacgcccaccagcaccacggccatcaacagggtgatcagccagaccggggcccgccacagcaggccggcggacgcacgggtgcggcctgcgatgggggaggaactgaccagtccgtggaggtcgtggcgcagcttgcggcgtcgctgctcgcgggcgcggcgacgcgcgtcatggcgtgcgctgtcagccacgggtccctcccctcgaccagcgggacgcgtgggcggcccggactacggatagcaacgtgggccgcagtaggcggcccggactctacggatagcagcgtgggccgcggtgggcggcccggaagctaccgcaacatcctaggggtgcagcatgtggtttcacttgcgcatgctgtggcgcagcatgaggcccatcgccaaccagagcacggcggcgatgccggtgacgatcagccaggcgtgcggcgcgttctccagtggcagcgcaacgttcatcccgaagaagccggcgacgatcgtcgggatcgccaacagcagcgaccagaccgtcatgaagcgcatgatgtcgttcaggttgttgttcaacacattgttgtaggtgtcggacaactggccgatgatctgcgacgacatctcggtcatctccaccagctggttcgcctcgatctcggcgtcgtcaagctgctcgcgggccgaatccgacaggcggtgatagggctgttgcaccttgatctggcggatcaccacggcgttctgcttcgccgcggccaccaggtagatcagcccgatgcccaggtcggacagctccaacagctttgacttggtggtgcgctcgcgcaggctgctcgtgtagtggcgccgttccgcgtcgacgtcctgcaccagcgggaagaaggcgtcggagaccaggaacagggcattgaacagcagctcgatgggcgtgacctcgggatgggccttcacgaagccggcgatcaggtcgttcacatagctggtgtgctcatcgttgatcgtgaacagctcgtggtccttgacgatgaaggtcatcgggctggcgtcgtagtggttctcgatcttctcgcggtgcgccacgttgaagatgagcaggaaggtcccggtgtcggcgtcgtattcgacgtgggcacgttcgtgggggtcctgcgcgtaggtcaggatctcctggtcgatgttgaactggctggcgagccgcttgaggccgcccgtgtcgctggtggccgttgcgtaccagcggaattggccctcgccgaagacggtcttcatcggtcagccggtgggcaggtccgccggacgcaccgggctgacgcgcgggtgggcggcgtcggtgtagtcgtagggatcgaagtccgtcagctgtgaccaggggccgtccacgtcgaaggcgacgagcgtcgcggccgggaaggcgcactgcatcaggtcggcctcgcggtgcgaggcggcccaggtgaggttggcggccagcgacgggatgcccggggcatgggcgagcacgagcagggcactgacctcgtcgggggtctcgccgatgcgctgcaacagcgtggccggcgaggcgtcatagagcgccttcatgtattcggcgcgcaccggacgcccctcggggtcgctgagcgccatggcggcgaaggtctcgcgggcccgttgcgctgcggagaccatcgccagttggatgccggcggcggccaacagctcgccggcatggtgcgcctggtcgcgtccgaggtcggtgagcccacggctcatatcgccggatggcccgaacgattcagcctgggcatgacgcatgaggtacagcttgctggtcatgtcacgagactagccgggcgggcttcacggccaccatcagatcccgcttgatcgacgaatccacgcggtgggcgaactgcagccaggggccgtcgtcacgcacctccagcccggcgtcggtgcagatcgcggccaggtcctcgcggctgaggccataggtgttccacgacagccccagggcgccgccggcgcgcaattggccggcccagaccgggatggcgtcggccagcagggtggcgggggagcggtcgcggtcgccgcccgggcgatggcccgtcgggtgccctgcggagccgcgcttcccattttcccgggaggccctgcgcgcatcggtggccccgtgcaccacgccgtagggcgcgtcggtgacgatggcgtcgaacttgcgcttgccgaacagcaccgcggcgtcgcgggtgtcgccggtgaacatggtcatcgccagctgcggggcatcggggacggcccggtggccccgggtctgctcaccgggacgggccgtggcatccaggcgctggcccatcatccgcccgtcgcgacgcaccgtggtcacctcggcggtgtgcttgaggcgcttgcgacgcagataggtcttgaggaagccagcgaactgctcgaacgccgatgtgtcgagctccaccccgtaggcattgtgcccggccgtccaggcggtcagcagggtggtgccgcgtccggcaaggggatcgagcacgtcgaactggcggcgcgtctggtcatggccggtgggggcgtcgcggccggcggcagccgttccccgacgggtggtcacctggctcagcgtcacgtgcagcaacaggcgggtgaacagctcgttggtcttgccgcggtacttggggatggtcaccaggtcgtcgtccagcacgtcggagcgcggcagctcgatgggccgcagcagcacctcggagggggacgtggtgggcacgtccgccgcgggttcacttccgaagagcgcggcctgctcggatgcgcgcccggggagctcggccggtgcggatgcgcgctcgaagagcgcgagcacactcgactgggcggcgatcttgcgcggatcgaggtcatcggcctcgaaggccaggtagtcgacgcctgccacgcggcgctccacggcggcgccgaggtcggggctcgtcacggccagctcggcggcggccagggtggccgtctcggcggcatagacgtggttggccgagggcgcgagcagcatcaggtaggcggacacgtcgcacatcttgtcacggtgtccgcttgtcatggtgtccgcttgtcccgtgggccctacctgtcccgggggccccgcttgtcccacgggccggaacacagtcgcgcccgggcacggctgtgcagcacatgcccgggcgcgaccacgagaatcccgctgggatcacagatcccgcgttcgtcctactgcaggtcaaccttcaggtgctcgtatgaggtgcccttggcgcgctcgaaggaggcgcggatctcggcctcggcgtcggtgcggcccgtccaggaggcgccctcgacgctctttccgggctccaggtccttgtagacggtgaagaagtgctcgatctcgagcatcaccatctgggggacgtcatcgatgtcgtccatgtaatcgcgacgcacgtcggcagtggggatgcacagcaccttgtcgtcggggccggcctcgtcgcgcatccggaacatcgcgatggcgcggcagcgcaccaggcaacccgggaaggtcggctcggtcaggatgaccatggagtcaagggggtcgccgtcctcgccgagggtgccctcgatgaacccatagtcataggggtactgagtggaggtgaacaacgtccggtccaggcggatacggccggtgttgtgatccatctcgtacttgttcttggtgccccgcgggatctcgacggtcatgtcgaaggtcaggtcgtactgcggaagccccgttgcaatgcgaaattcatcggtcacagtgtgagtccttatgatgaggaaacttgtcgatgacattaccttgttgggagccggctgtatgaagtccgcgacgcgacgcccgctgacgcgctggattgtcgccttcggggtggtgttggtgctggtcatcgccgggtcggtggggctgcatgcctccggtgccctggtctcggggggtgcctcgaccgtgccggccggcgtgttcgccacccccgccacgaacctcaacggcaatggcgtcatcggtgacgccccggtgccggcctcctacgcggccctgtccgccgacaaggtggccgcggccctcaaccgggtgggcgtgcgcaatggctattcggtggtcgcccgcgacctgtcgaatggccaagtgctcgatgccacgaggggcgatgatgcggtgatcccggcgtcctcgatgaagctgatgaccaccagctcggtgatcgacaagctggggcccacccacaccttctccacccgcgtgatgcgccagcccgacggctcgatcaccctggtcgggggcggcgacgtgctgctggccagcaccccgacgtcatatgcctatgggtccccgcagccggccaccacccaggacctggcccagcgcacggccgacgcgctgaaggcggcgggcaccacgagcgtcaccctgggctacgacgattccctgttcagcggtgcgacgcgccatcccgactgggaaccgggcgacatggcctatgtgaacgacatctcggcgttgatggtcgatgagggcggcggctccaccacgccggcggccacggcggccaccaccttcgcccgccagctgggcgccaacggcatcagcgtcaccggcacgcccaccgcccatgtctcccagtccggtgcgacgcagctggcggcggtggattcgctgccgctgtcgcagatcgtgcaggaatgcctgcgccactccgacaacacgatcgccgaggtgctgttccggcacctggcgatcgcctacggacagccgggcagcttcgacggcggcgtccaggccctgcagcaggcgatgacgcacctgggcctgtggagcggcgtcgactcgttgcacgacggatcgggcctcagcgtgcacgaccgcctcacggcgtcggccctgacgcaggtgatcaccctggccgcaggacgcgacgacctgcgcaatctgttggcgggacttccggtcgccgccgccacgggcagcctggagacgcgcttcatcgactccgcgtcgtcggcggggggtggacgggtgcgcgccaagaccggcacgctcgacacggccagcgcgttggtgggctacacgcccaccgcggatggcggcatggtggccttcgccctggtgggcaatggcgtgggggcggaggtgcgtccctatctcgaccagatggccggggcgctctcaggctgcgcttgcgctgcctgacgtccacggggactgcgcttgcgctgcctgaggtgggccgggactgacgtccgcggcggccggatgcgtcgtccgtgacgtttcctcggggccagctttgagttcactgtcaccgctgcatgccggggttgcgtgtgggtggcgcttgataggttcgccgtatgggcgtgcagtcgactccggaagagcctccgcaatccggtgcggcgctgccctgggtcgactgggacaccaccctgcgcgtggcaacgtcgagcgcgccgatcggcccgccggtgagcctggcagagcgtcggcaggccgtggaacagctgcgcgccagcgccgagcgtgccccccagatcgtggccgacgcgtcccacctgcagccacccgcccgtggcgaggccctgatcgtcgatcgcgccggcttcgcccgggcgaacaccgacatgatgcgccagatctggcagggcatcggcgtggaggtgcgtccccgtggccccggcctgatcccgggcatcgtgcggggcggggccgtcggcaagatgatcgggctgctgtcgggccatgtgctgggccagttcaacccgttggggtcgccgccgcgattgttgctggtggcgccgtcgatcatgtccaccgaacgccgcctgggcgtcgatccgggtgacttccggctgtgggtggcgctgcacgagcagacccatcgcgcccagttccaggcagccggctggctcaccgcgtggatgctcggccgcgtccgggcgctcatcgaggccgatgccgaccacgaatcggccgtgcacggcgcgctggaccatttcgcgatgctcaagcaccaccgtgactccgacgacgacgtcgcgctcacgatggccgagatgctcaccactccctcggccgctgcggtgctggagcaggtgagtggggtcatgtcgctgctcgagggccatgccgacgtgatgatggaccgggccggccccgaggtgattgccagcctggccaccatccgggcccgcttcgacgcccgccgggggcgcggcgggccacagatgatcatgctgcgcgcgctgggcatgggcgccaagctggcccagtaccgcgagggtgcggccttctgccatgccgtcatcgacgccgccgacaacgacgacgagggcatcgagctgctcaaccgggtgttcaccagcgccgccgagatgccctccctgcacgagatccgccaacccgacgcctggctcgcccggatgggcgtcgacgtccaccgctgatggcaacccgagccctgggtcgggccggcctcgccctggtggcggccgtcagcgatggcctgcaacgcgcgtccgagcaggggagccgggtgcgggtggcctgttcgggcggccccgattccctggccctggcggccgccgtcgcggtgtgcgcccggcgtgatccggcgctgctggccgaggcgctggtggttgaccaccagctgcagcccggctcccgtgaggtggcccacgcggccgtcgatgcggtgcggggcctgggccttcccgcccggacggtggcggtgcaggtgccgcacagcggcgagggtcccgaggcggcggcgcgtcgggcccgctacgaggcgctggccgcgccggacgccgcgggcgggcgtcgtcccgaccttgtgctgctgggccacaccctggatgatcaggccgagacggtgttgctgggcctggtgcgcggctcgggcatcaggtcgttggccggcatgccggcgcacttcggcagtgccccgcagttctggcgcccgctgctcggcgtgcggcgggccgacaccgaacgggcctgcgtcgagtgggggctggcgccctggcacgatccacagaaccgtgacgaccgcttcacccgctcacggttgcgccatcgggtgctgccggtgctcaccgccgagctgggcgagggggtcatcgaggcgctcgcccgcaccgccacactcgccacgcaggacgccgactacctggacgccctcacctcctcggcactgacgacgatcatgggtgacggcggcctggactgcgcccggctcgccgaccagcccgcggccctgcagggccgactggtgcgccgctggctggccaccgtgggcatcgtcggcctcgacttcgaacgcactgccgcggtattggcgctggtgacgcactggcggggccagaagggcgtcgacctgcccggtggccatcgcgtggtgcgccgggctggcgtgctgttcctcgaccgctgagggcgggtggccgctgtggcccgcccgcttgtccgcgggcggtggccctgctccagcccagtgccccggccaggcgcaacagcccagtgcaataggctgtgccccgtgtacgccacggacatcagcaatgatctcgaacatgtactcatcccggccgacaagctggccgcccgggtggaggagctggccgcccagatcgacgccgaccacgccggtcaggacctcctgctcgtcggagtgctcaacggcgccatgatggtgatgtccgacctcagccgcgccatgaagagccttgtcaccgtcgattggatggcgatctcgtcgtacggcgccggcacccagagctccggtgtggtgcgcatcctcaaggacctcagcaccgacatccacgaccgcgatgtgctcatcgtcgaggacatcatcgacaccggcctgacgctgagctacctggtgcagaacctgaccagccgcggcccgcgcagcctcgagatcgccgccatgttccgcaagccggaggcggtggacgcccccgtcgacgtgaagtacgtcggcttcgacctgcccaatgagttcgtcgtcggctacggcctcgactacaacgggctctaccgcaacctgcgcgacgtcgccacgctggcgccgcacgtctaccgctgacgccgacccctcctgtccctgtcgggcccactggtggctcgtggatgattggatgaccaccagggggcgccatgacaacaccacgcgtggacgacgggcacgtgggcgacgagcagcatgcgcgtgacgacggcctcgtcctcactgcagagttccgcgacgccctgacgcgcctggcgcgcggcgagaacctcttcctcaccggcaaggccggctcgggcaagtcgaccctcatccggttgttcatggaatcgaacgagcgcaccgtggtggtggcggcgcccaccggcatcgccgcgctcaacgtcgacggctacacgatccatcggctcttctcgttcaacaccgccaccacgccggaacaggtggcctcgggcgactactacccgggccgcttcgcccgcacgctcaagtcgctggacaccctgatcatcgacgaggtctcgatggtgcgggccgacctgttcgactgcctcgtggcggcgctggaacgcttcggaccccaccccgggcagcccctcggcggcgtccaactggtgctggtgggcgatctctaccagctgccaccggtggtcaccgagggcgagcgggagtacttctcaaccacctacgagtcgccctggttcttctcggcgcacgcctaccgccgcgacgacttccccaccgtggagctcaccaccgtgttccgccagatcggcgacgcacggctggtgcacctgctcaacgccgtgcgcgacggcaggctgctggccgctgcgcgcgccgagctgaaccagcgcaccgaccccgggttcgagccgccgatcgacgagttctggctcaccctggccaccaccaaccgcatcgccgcggcccgcaacaaccgccagctcgcgcgtctcggcggcaggcagtacagctaccgggccaccgtcaccggagacgccacgggcttcgacgcccctgccgacgaggtcgtcaccttcgcagtgggtgcccaggtgatgatgctcaccaacgcccagggcgctcatggcgagggttcccatggccggccgcggtgggtcaacggcacgatcggacgcatcgccgcagtgcgctacgaccacgacgagccggtggtcaccatcgcgctgcccgacggtcgccacgaggaggccgggccccacgcctgggacatcacccggccggtcgtggagggtggccgactgcgccatgaggtggtcggcagcttcacgcagctgcccttccgcctggcctgggcgatcaccatccacaagagccagggccagacgctggaccatgccatcgtcgacctcagcggcggcaccttcgccgagggccagctctatgtggcgctctcgcggtgcacgagcctggccggcctggtgctcgcgcgcccggtgttgccgaaggacctcaaggcggatcagcgcatccggcgcttcctggcgtcggcccgcacgtcggtgccccggcgtggcctggccttcctgacggtcaccttcgtgggcgacgagggacgcatgtggcggccgcgtccgctcgagctggcggtggtcaccgacgacggtcgcgagctggtcacgctggtgaatcccgaccgcgacatgggcgaatcggcccgtgacaacgccctgtccgcctccgatgtgcgcttcgccccgatgctgggggaggcctggccggccatcgagcgctgcctggacggatatgggctcatcggcgtcgacatcgaccagaccctcgattacctcgactacgagctgaagcgtggcggcatcgtgtccccgatgccgatcggtggcgaggccgagtcattgctcagccccgacgaggcgcgcgagctggacgagctgcccaccctgcagcgcgcccgccggctgcgtgaactggtgcttgcccgtcggggcaccggacgcgagttcccggaggggtcggggccccgtacggcagccccgaccacggatccctgggcggacatcgagaccttctcgcgggccggcgcggccgatggtggccccgtccgccacggcgacggggccgagcagcccgccgtcctgttggtgcgcgacggcgcgcaacgatccttcgtcgtggacgcccccgacatggcctccgaggccgaccgggccgccttcctggccgcccggctgcgtgccgcggcgtcacgcaccgtggtcgacgatggggcgctcgccgagctcgagcagctggagcgccagtggggcgtcaccatcatcaccgacgcgatgcgccgtcccgccgacagtgccgagcaggtcttcgtgcccggcgcacgggtctgcttcaccggctcggtgatcgacgcccgggggacgaccatctcgcgcagcgacatggaacagctcgccgccgagcacgaactggtcgcggtgccctcggtcaccaggacccgctgcgatgtgctggtggcagccgacaccgcgtcgcgttcgggcaaggcccgcaaggcactcgacctgggcaagccggtgatctcggccgcagaattcctcgcatgggcgaaccccgccggcccgggccgatagcgccgcaacgtccccctaggatgggaatgccgtccagaaagggagatcccttgtccgaatccacgcgcgccggccggtccgacgagacccgcgaaactgacgccaccgaccacgccatcgacaattcggcctacgagcagcccggcctcgaactgccccccggcttcgacgggaagcgcatcgaggcggccatgcgcgaggtgctcatcggcatcggcgaggaccccgaccgcgagggcctggtggagacgccggcccgcatcgcgcgtgcctacggcgagatcttctcgggcctgggcaaggaacccgacaaggtgctggcgcgcaccttcgacatcagccatgacgagatggtgctggtgcgcgatattgacgtgcactccatgtgcgaacaccacctgctgcccttccacggacgggcccatgtctgctacatccccgccaaggacggccgcgtgaccggcctgtcgaagctggcgcgcctggttgacctgtacgcccggcgtccccaggtgcaggagcgcctcaccacgcaggtggccaatgccctggtcgaccagctgggcgcgcgcggcgtgctcgtggtgctggagtgcgagcaccagtgcatgacgatgcgcggggtgcgcaagcccggcagcaccaccgtcaccagcgccgtgcgtggcgtgctgcgtgacccggccacccgctccgaggccatgagcctcatcgtgcgcaaccgctgagcagcttcccatgccgagcgctgcgagggagccgggggacgggccggaccatgccgagcggcccgacggcgcaccgcgccggacgggcccgcaggacgcgtccggtcgtgggggcaggccgacaggtccgctcgtgcacatcgacgccgcgtcgccgaccccggtgttcgaacagatcatcgagcagctccgccgcggtgccgtgcagggatcgctcccggccggcacgcgactgcccgcggtgcgcgccctggccggtgagctgggcgtggcggtgaacaccgtggccaaggcctatcgccagctcgaggcggagggcaccgtggtcaccggcggacgcaatggcaccacgatcgccgccctggcccatgcggagcccacccgggtggccgaggcggcgcggaccctgatcgcccgtgcccgcgacgccgggctgtcccgtgaccagaccctgggcttggtggcccgtctctggtaggtcagggcccaccggtccgtctgtagtgaacccccgggcccggcggcccatgggtggcgagtccgcccgcagcccgcgccggcatggtcctcactaggctgcagctatgagtctcgggggtagtcaggacgatcatcaggtggccgatcgggcggatcgtcccggcgacggccacacgcgggtgatgggcatcgtcaatgtgacccccgactccttcagcgacgggggcctgtacctgcacgccgacgccgccatcgcccacggcgtcgagctggtgcggcagggggctgagctgctcgacatcggcggcgagtccacccgtccgggcgccacccgggtgagcgaggacgaggaattgtcgcgggtgatccccgtggtgggcggcctggccgccgatccccgcacgcgtgacatcccgctgagcgtcgacacgatgcgcgccagcgtggccagggcctccgtggaggccggcgcggccatcatcaacgacgtctccggggggcttgccgacgacgccatgttcgccaccgtggccggcctggacgtcgactacatctgccagcactggcgcggcttcgggcaggagatgaaccaacgggcccgctaccacgacgtggtcaccgaggtgcgcgacgaattggccgcgcggctggcgctcgcggaacaggccggcatcagccacgaccacctgatcgccgatcccggcctgggcttcgccaagatgggcgagcaggactggcaattgctgcgccacctcgatgtcttcgtggcgctcggccaccgcgtgctggtgggcgccagccgcaagcgcttcctcggcgtgctgctcaacggacgcgaagcccgcgaccgggacgccgcgaccgccgccgtctcggcctggtgcgcccagcgcggggtgtggggcgtgcgtacccatgaggtgctcagccaggcggacgcgatcgcggtcaccgagcacctgatgctgtgacggccggattgccgcgtcgggaaccatcgctcggcgaaggcgatcccgcgtggtcggggcattgtggcatcggatagcttggaatcagaacagcgtgccaccccctgcatagcgcaggagtcgtcatccgaccttgaggagcaacgatgtcagtagagccggaaatgggatttgtggtggtgtccctgagtggaatcaccgcaatgggacaccacggcgttcttgaatcagagcgccgggagggtcagccgttcagcgtcgatctgcggctggtggcccctgagccgggcaccgacgagctgtccgaggcggtgaattatgccgaggtcgccgagttggtgagcgacctgatccgttcacaggccgtcaatctcatcgagacattggctgcgcgcattgccgatgcggtggtggagctgccgcgcgtgcgcgaggtggatgtcacggtgcacaagccgcacgcacccatccccgtgcctttcaacgatgtcacggtcaccgtgaacaggaggacgccatgaacgcattcattgattccgacaccctgggcgacctgaagccgctcaacagggtggtattcagcctcggttccaatcagggcgacagcctcgatatcctgcagggcgcggtggacatgctggccgccaccccccagctcatcatggttgacgtggcgccggtgtatctcaccaagccggtgggcaataccaatcagcccgatttctacaacaccgtggtgctggccgagtcgacgatggaaccccgcgacctgctcgaccgggccaatgtgatcgagcaggcctatgcgcgccatcgcgatcccgacaatccgcacggcccgcgcaccctggacgtcgacctcatcgtggtgggcaagcgcacctcggccacccagcggctggagttgccgcatccgcgcgcccatgaacgggccttcgtgttggttccctggctcgacatcgacccgaaggcgacgctgccgcagggtccgatcgccgacctggtggcccgcatggacgtcggcggcgtgcacaagctcgacgccggcctgctgaagccctgattcgcctgcgcggccttcccggtcgatgggctgccgcgatgccgccgcgtccccgaataggggtcttttccgggtggggatcagattccgggccgcatcggattgccgggagcgggataaccggcgcgggccggatagcccaggggtgccggatagcccagggatgccggatagctggcgggatcagatagccgcagcgatagatcgcgccgatagcgaacacttcgggtggcgccgctgcccgaggcgggccggatcacaacccccccggccgttcgccgcgcccgggtgctcccattgtgggggtccgtccaatgccgggagcatccattgcaggggtgtgcggcagcgattgcccccatcctccatagcagtcccggggccgtatcgcatatttggtgcaatccattgcacatctgtgaacgtgatcatgcaccgatatcacatctgtggtcagcggtttggggtgccccggggttgatgtcgacgcgatgctctgtaaactacttatcagtgattaaatcttggagcagattttagttgtgctgctcatcctgggcctacgaaagggttttgacatggcacgtaacgtgaaggtcgttctcatcgatgacgtcgatggcggagacgccgaccagacgatcaatttcggtctcgacggcgtgaattacgagatcgacctgtccaacgcgaacgcacagaagatgcgcgacgagctcgccgtctgggttggccacggccgccgcgtcaccggtcgtcgcggtgccgccgcccgcaagcagggcccgtccgacgccgcgaagatccgcgagtgggccaagtcgaccggccgccaggtgccgctgcgtggccgcatccccaatgcgatccgcgccgagtacgaagaggccaccaagtagcgcaccagataacagcgcaccaagtaacaaggtcgtagctgctcgggaacccgggacgctgacgcacgctgtccgctcccatcagggagcggcggcaggccagcagggctgagcgcaacgggccgagttcgcgcactggcccagtccaggagcatgcgcagcggggtcggtgtggacaatgtccgcgtcggccccgctgtgctgtccccggctccgctgctcggacccccgcgcgactcgtggcaggcctgcgggcgtcggcgggaatgccgagggggacgccggggaacatcccggggctccgcggtgttgatacgtggcaagtcgtccagtcgttagcgggcgccagccgtcattccaccagccccatccccggggcgccgatcgatcctgcgggggccgatccccaccggggaccggctgccacggttggtgtgtggtgtcgggacagcggtttgcgggacagggagcgccccactgtgccacgtggcacagtgttgcttgagaacggcgttgcctacgaagcgccgggggcgtcgggctgttgacgacgcgccacggcgccgggttgtccaccacgagccgtccggcacgctgggcaggtcgtccaccaccgtggatccaggcagtaggtttgcaacatgagcgtacgtcgctcaggttgagccagcggcgaacgacgggaacagatccgattacctgagggtttgtagaattgaaacatgagtccgggagactcagcccaaccgggttgaggggtccggcactcttggagggccggcaggcccgctgaaggagaccaatgtttgaacgctttaccgaccgcgcgcgccgcgtcatcgtgctggcccaggacgaagcgaagatgctgaatcacaactacatcggcaccgagcacatcctgttgggcctcatccacgaaggtgaaggcgtcgcggcgaaggctctggagcagatgggcatctcgctggaggctgttcgcgaacaggtcatcgagatcatcggccagggctccaccccgcccaccggtcacattccgttcacgccccgcgccaagaaggtgcttgagtactcgctgcgcgaggcgttgcagatgaaccattcatatatcggcaccgagcacattctgctgggcctcatccgcgagggtgaaggcgtggctgcccaggtgctcatcaagcttggggctgacctcaatcgcgtccgcaccaccgtgctgcagttgctctcgggctaccaggaagaaggcggtggccagccggctaccgctggcgctcccgaaatgggccccggcaccagcacgaacaatggtgcgcttgaccagttcggacgcaatctcacccaggctgcccgcgataacaagctcgaccccgtgatcggtcgtcagaaggaagtcgagcgcgtgatgacggtgctgagccgtcgcacgaagaacaaccccgtgctgatcggcgaacccggcgtcggcaagactgccgtggtcgagggcctggcccaggcgatcgtgcgcggagatgttcccgaaaccctgcgtgacaagcagatctacacccttgacctgggtgcgctggttgccggctcccgttaccgtggcgacttcgaagagcgcttcaagaaggtgctcaaggagatcaagacccgtggcgacgtgatgctgttcatcgacgagctgcacaccctggtgggtgccggtgccgccgagggcgccatcgacgcggcaagcatcctcaagccgatgcttgctcgtggcgagctgcagaccatcggtgccaccacgctggatgaatatcgcaagcacatcgagaaggacgccgcccttgagcgtcgtttccagcccatccaggtggatgagccctcggtgcagctgacgatcgagatcctcaaggggctgcgtgatcgttacgaggcccaccaccgcgtcaccatcaccgacgaggccctgagcgcgggcgccaacctggccgaccgctacatccaggatcggttcctgcctgacaaggccatcgacctgatcgacgaggccggtgcacgcatgcgcatcgcgcgcatgactgcgccgccggacctgcgcgagttcgacgacaagatcgccgccacccgtgcagagaaggaggccgcgatcgaccatcaggacttcgaggccgctgccaagctgcgtgacgacgagcgcaagctcaccgccgcgcgtgccgagaaggagactgcctggcgcgaaggcgagtccgatacgcccgccgtcgtgggcgaggaggagatcgccgaggtgctgtccagctcgacgggtgtgccggtggcacgcctcaccgaggaggagtcgcagcgcctgctcaacatggaggacgagatccacaagcgctacatcgggcaggacgaggccgtcaaggccatctcccgttcgatccggcgtactcgtgccggcctgaaggacccgaaccgtcccagtggctcgttcatcttcgccggcccgtccggcgtcggcaagaccgagctcaccaaggcgctcaccgagttcctgttcggcgacgaggatgcgctgatcaccctggacatgtcggagtactccgagaagcacacggccagccgtatgttcggctcgccgcccggatacgtcggctacgaagagggtggccagctcaccgagaaggtgcgccgcaagccgttcagcgtgatcctgttcgacgagatcgagaaggcacaccccgatatcttcaactcgctgctgcagattctggatgaaggtcgcctgaccgacgcccagggtcgtgtggtcgacttcaagaacaccgtgatcgtcatgaccacgaaccttggttcgcgcgacatcagtcgtggcgtcaacctcgggttctcgaagaccggcgacaccgagaacagctacgagcagatgaagtcgaaggtgagcgaggagctgaagcagcacttccgccccgagttcctcaaccgcgttgacgaagtggtggtgttccaccagctgtcgcaggacgacatcctgcacatcgtcgacctcatggttggccagatcgagaatcgccttggcgaccgcgacatgggtatcgagctgacgcccgctgctcgtgaactggtgggcaagcgcggcttcgacccggtgctcggtgctcgtcccctgcgtcgtgcgatccagcgcgacatcgaggacccgatctcggagaagatcctctacggcgacctcaaggccggttcgatcgtgctggtcgacgtggctgagggtgccaccgagaagtcgacggaggcgttcaccttcaaggggatgccgaagcacgacgaggtgaccgactcggagttcgcacagctgacaggtgcgggaagcactggcggagacgccggtccggctgagccgcaagcgcccagcgcttcataagggcacggcgcccagcgcttcgtaggaaacgcagaagcagagtcaggaggggccgcacatcccacaggatgtgcggcccctcctgcgtcatgtcgggaatgtggcgggtaacactggttcaggtgactgcgtgcaccgggaccggcgtgctcaggcccgcaggccggcggcgtccgccacccgacgggtgagctccgacaccacccgggtggccaggaatgcggcgggcagtgccagtaggtcggcgataccgctggcgatgaatccggcgcgggcacccgtcgtccccgaggcgccggccacgatccaggcggccaccagttgcgcggtggcgaaggtgatccagcaggcccaccagcgcgtggtggcggcgcggaagtcgtcgaggcgcacctgagccagctcaatcgatccgcggatgccgtcggcggccatctcgtccttgcgcacgatggtgaacacccggtgcagcgcccgcaggtcgaccagcggacgccacaggttgatcagcgggatcacccagttgaacagctgccaggccggctgtgacagctcgggggcccagcgcagcgccatgcgggcggtgccgcgttgccagaccagccagacgatggcagtgagcatgaagaccagcccggtggcggtggtcagcagctgccaggcgtcgaacatgcgcaggcccgggtcgtcgacggagtcagtgggggtgtccacccgggtggccagtagcaggcacatcgcgccggccaacagctgcacggccatgttcagccacaacagcatggtcagcaggcgggcctgggaacgccagccctgtgggggtgttgggatgctcatcgctcggcgtgccgcacgatcgacaacgcttgcgcgaggtcatccaggggcagctggccgggggccgagccgtgctcgtcgagggcggcgaagctggcgcaggagccgaagtcgcgtccgcacagtcggctggccagccccaggcgtcccatcgcgatggtcagcaggggggtgtgcgcgtcgcgcgagcgggtggcggtggccaacagcaggcgggcggtgtcctccgggttgtggggcatcacggcgagcttgcacagctgcgcgccggcctgctccatggcttccaggtgggcgaccatcgcgtcgagggagggcgtgccggcgaagtcgtggaaggagccgatcaccgcggtgctggccctatgggcggacgcgatcgtctcgggggcggcgggatggcggtactccacgtccaccgcgtcgacgtcgtcgaggccggccagggtggccaccaggcgtgcgtagtcctcgggtgatccggtgaagtgaccgccctcgctgcccgtgcgcacggtggccagcaatggcttgccggtggtggtgcggatgtggcgtgcggtgtcggcgagcagggcgtcatcggcaccgggtgcgaaggcgtccacccgccattccaccaggtcgaccgcgggttgcgaggccacctcggcctgcgcctgcaccgctccggggtctgcgccggtgaggggcacgatgattgccgtgtgtgggccgcccagggtgaggcccgccagttcgaggactgccatggggccagcctagggccgcgggtaccgatggcgccgcgcccggtcccgcgccaaggggctgggcagccccggggaaagaagataggcgtggattgagcaccgtagagggtgcttaatccacacctatcccggggttggcccagcctcagacggccccggcgtccacctgcccggcgtcatgcaggatgacgtcggccagctcgcggggacggtcccggcgccagtgttgacgctcctgggcggcccagcggtcccagtggggggcatacagctcgccgtcgcgtcccagcgcgcgctgcttgcggcgcgccgcgtccatcacgaaccacatcgccgtggtgcccaccccggcactgaacgcggtgagggcgccgcagccctccaccaggatcggcgcgtcgccatcgaggcccacccggtcggtgcgtcgcccggcctgccagtcccagcgccaatagcccggatcgtgcacgcgcaacacctcgggcagcatcgtgctggcggcctgcaggccatcccagcccgggtagaagctgtccatgctcaccagctgcacgccgtgcatcccgcgttcccccagcgcgcccaccaggcgcgtcgccagccgggtcttgcccgcgcccgatccgccgtcgagcaccatgactggccggcgtccccgcgcgtcacgcaccaggcgatccaccagccggtcgaggtcgtcgggcagcgtcatatccgtggccatggacgccccctcagcgggtgaccggggtgaaggtgcccagcctgatcgacaccgccagggccagcgccaccatcaccacggccaccaaccagccgacggcgtcggcccgtcccatgcgcgagggacgcgcccaggtgcggtgtgcggcggtgctggcgtcgaagccacgggcctccatggccgtggcgagcttcgtgccgcgccggatcgcgaacaccaacagtgcgaaggccatcgtcgcgaagcggcgcagccgtccggtgtcgcccaggccgcgtgccctgcgcgcctgggccatggtgcgccaatcggcggcgaacaggttgatcatgcgcatgccggccaacgtgcccagcacgaagcgcgccggcaggtggcagatctgcgccagcccgtcggcggtggcggtgaggtcgaggccacccatcagcaccagcgcggcaaggccgagcgcaaagatgcgcagcaccacggcaatcgccatcgtcaacgaccgttgcgagatcaccacgagccaccactggaagtacacatcgccgccgggcttgccgtacagggccatgctgatggccgccagcggcgcgacgatgagcagcgggatcattcgccgtgccagcatccgcgcccgcacgccacaggcgaggaacaccaccagctcgccgacgaagatcaccgtggcgctcagccagtcgaggctgatcaacacggggatggccaccagcacggtgagtagcaggcgcgtcaccgggttgagccgggccagcgctcccgaccagtcggcgccggacgccccggactggtcggtgccggtcagtggggcgtgggggagtgcggtcatggtgccatccgatggtcgctgggctggtcggcactgggtcgctcgccgctgggctgatcggcactgggctgacggtccttgggccgacgctcgccgggcgcatggccagccggccgaccacccgcgggcgagctggccgacgccgggtgcggcgacgcaatgtcgagtcgcagttcgttctcgcccagcacctcgaggtagtcgcggtcgtgggtcaccgagatcacggtgcgtccctgctccaacacgtcctgcaccagctgcacgaggtcgatccacgtggcgcggtcctggccgaaggtcggctcgtcgagcacgatcacccggggctcggcggccagcacggtgccgaccgacagccgccgcttctcgccacccgacagggtgaagggattggcgtcggccagcgactccaggtgcagccgggccaacagcgcgtccaccctggaatcgatgtcacgggcccctcggcccagcgccttgagcccgaccgccagttcctcgcgcaccgagccggtgacgaactggtgctcgggattctggaagaccgtgccgatgcgggtcagcaggtcgcggcttgcccaggtgatcggacgcgccggatcgaagtgccggtgcatggcacgggtcaggaacctggcggaggtcggacgcagcgatggcgccgcctcgacgctgccggcgagcggttcgagcagccccgccagggtgagtgccagcgtcgtcttgccggccccattggggcccacgatggtggtggacaggccggcgggaacctgcgttggttccatcgtgcgcaccggatgcgccctgccgtggccgatggtgaggtcgtgtgtggtgagcaggggctcgccgggtgccgggggcgtgcgtggttcgacgccccgtggtgcgccgggcacccagacgcccgcccgggtgagcacctcgcgttgcgaggcgaagacctcccggggcgcgccgtcggccagcaggccagcatcggccgacacgacgatcacgcggtcgaccaggtcggtccagatgtccacacggtgctcgacgaccaccagggtggtgtgccggtcggcgaccaccgaggcgatcgcgtcgtgcaccgtcgtgacgccctcgggatcgaggttcgccgtgggctcgtcgaggcagagcatgcccggcgcgcccggcccacccatcatggccagggcgccggcgatcgccaggcgttgctgctggccgcccgacagcgccgtggtggaacggtcgaggggcaggcgcaggtccaccgcgtcgagggcggcccgcacgcggggccagatctgctcgcgaggcactgccaggttttcgcacccgaaggcggcatcgtcgccgatgcgctgcagaatcatctgcgaggtggggtcctgcatcaccaggcccacatgtccacgcatccgggtggggtgcttgccacccaccagcaggctgccggcctcctcgccctcgtcgtcgccgccgagcaccccggtcagggcacccagcaatgtcgacttcccggcgccgctggcgcccaggaggagcacgcgttcgccgggttcgatggtgaagtcaaggtggcgggcggcccatcgtgggcggcccgcatagcgccacccccagtcactggcgacgacgcccggggcgacgtccgtgctgggggtgggcatgatgctggtggcgttcagggcgcgctcaggcttcgcggcccgaggagaaccgtgacagcacgccggtcctggcgagcgccttggtgagcagccatgcgagcaggccggccaggatggcgccggacaccaggttgctgaccaggtagacggcgttgtagccaaagctcttggcgatattgggggtggaaccgatgaacagctcattggcccaggcgccgacgccggcgaaggcgccggccagcagggtgacgggcagcgaccaggcgcggtagcggaagatcaggaagatgatctcggcgccgatgccctggaacaggcccgatgtgagtgtctcgatgccccatgcgttgccgatcagggccgacacgatggctgccacgagctcaacgaagatggctgcgccgggcttgcggatcacctgggcgcccagggtgccgccgaggtaccagatgccggctgcgatgccgcccaggccgggcagcagtgctcccatggccgaataccaggcgtagccgatggagttccagatccagaagatcagtccgcacgcgacgccgaggacggcggccacgacgatgtcgacgacacgccagtggcgggtgcccacctcgagcggacgcgtctggtcgctcgtcgctggggtggtcttgcttggtgacatgaaaatgtgccctttcgtgggttggggcacggtgcgggtggaacccgcaagaggccttcctgcgccggcatgatccggatcaggtgtgacggtcgaagactcgcgccttcctctcagcccgctgccggactcccgtgttcggccatcagtatagggaagtgcgataacgacggcccccgggtgctcgtggtggacggcccaccacggcgtgggatgctccgggacggcggctcacagcgtcacgcgggtgccctcgcggtgtgccagcccgtcggacaacaatccgtccaacgcacggctcgcctgcgcggggtcagcgggccagtgctgcaacagcacgctcacctcgaagccctgcggcgtggtgcgcagggcacccagcagggtgccgcgggcctgccggtcggtgccggcataggcctgggtgcgtcgcggtgggccgtcgtgggccggacgcccggccgccagccacgcgcagtcggcgcgcacggggcagtcatcgcaggccgggttggcggcggtgcacaccagcgcgcccagttccatcgaggcctgcgcccaacgggacgcggtgggtgcgtcgtcgggcagccagtccatcgccaggcggcgttcggcggcggtggtggagttcgcggggaactgccgggcggcgtcaaggcgggtgagcacgcggcgcacattcgtgtcgagcaccagggcacgggccccgaaggcgaagctggcaatggcgccggcggtgtagtcgccgacgccgggcaactgacgcagttcctcgacgctgtggggcacctcgccgccgaagtggtcgcggatggcggtggcggcggcatgcaggcgcagcgccctgcgcggataaccgagcctgccccaggcagcgacggccgcggagctcggctcggcggccagcgcatcgggtgtgggccaacggtccagccactcgcgccagggtccgaccacgcgggccaccggtgtctgctgggccatgaactcactgaccatgatcgcccaggggctggttcccacacgccgccacggaaggtcgcgggcagcatgggcgtaccactggttgacggtgcggaccaccgcgcggcgttgcccgggttccatcacgtgcggcaccccgcccccggtgttcgtcgggcgatcaggcccaccacgtcaggactgccacatcacgactgggtgcccagctcagccaaccgcgccaggccatcgcgcagggcacgggcgtgcttggcgtccatgccatccacgcgcatcaggtcctccaccgacaggtcgaacagctcctggatcgaatccacctggtcgagcatgcggcgggtcagcactgtgtcgagttgcgccgcctggtgcaccaagcggaatcccttgggcctcaggtgggtgtccagcggcatcgcgccgaagccgatcgccgatgacaccgactccggatcgagcaggtcgccggtcggcaactcctggagctcctccagggagggctttccgggacgttcctcgatgctgtagtcgttctccaacagggtggctgtctcgtcgacgccggcggtcaactcgaacaactgcagctgcagcagccgcccgtcgatgcccaatgactcgacatagccctcgagctccttggccagtcgacgggccatctcgacgcgctggcacacccgcaccaggtcgcgcagcgtcaccaggtcggcgatctccaggccggtgaggtagcgggtgtcgtcggtgagcctgtcgcggtagcgcgacagggtggccagtgcctgatcggcacggcccatgatctggtggctcggctcgatggggaagcgcatgccctcgaggaacagcgcgatcgtcgacatcgacgccgagacggtggccacgggaacatgtgcctgctgggcgatgcggtcggcggtgcggtggcgggtgcccgtttcgatcgtctcgatggagccgctgggcacgaagtgcacgcccgcgcgcaggatgcggtcgaggccggacgagagcacgatgtcgccgtccatcttcgacaattcgcgcagcgcggtgggcgtgaagtcggtgttgatcacgaagccgccggtgctgatctgctgcacgatcgcattgtcacccagcaccaccagggcaccggtgcggccgttgacgatgcgttccaggccctcgcgcaagggcgtgccgggagcgagcagcgaccggtactgccggaactgctcggccacacgccccttggcgtcacctattgaagccacacccgtatcctacggtccccgcgcgagctggcactggtcagcgccgctctgcgcggcgcaggtcgagcacgcccagcgcgtcggccacgctgggcacctccactaccttcaggttgtgcagcgtgggcgctccgcggctgttgtcgcgggagttggtgggcacgatggccagctcgaagcccagccggtcggcctcggcgacgcggcgttccagcgcgggcacgcggcgcaggtcgccggcgagccccacctcgcccatcgccagcacccgccgggggaagttccggttgagtgaggccgaggcgaccgcgaccgccacggccaggtcggcactcgggtcggtgatgcgggcgcccccgaccgtgctcacatagacatcgcggcggctcatcggcaggcgtgccttgcgttgcagtacggccaggatcatcgccacgcgcgagaagtcgacgccgttggtgacgcgccgtgccggcgtctcattgggcaccggggccaccaggccctgcacctcggccagcagcggacggcgaccctccatggtgacggtcacgcaggtgccgggcaccggctcgtcgtggcgggtggtgaacagcccggacggatcgggcacctcgacgatgccgccctcacccatctcgaagcaccccacctcgtcagccgggccgtagcggttcttcgtggcacgcaccatgcggaagccggagtgccggtcgccctcgaagttgagcaccacgtcaaccaggtgctccagggtgcgcgggccggcgatgccgccgtccttggtcacatgtcccacgatgatcacggccatcccgcgggccttggccacccgcaccagggccgtggtcacctcgcgcacctgtgcgacgcccccgctgacgccatcgccgctgccggcgctgacggtctggatcgagtcgagcaccatcaggctcggctccacctcctcgacgtggcccagcacggtgcccaggtcgttctcggcggccaggtagagctcatcggccagcgcgtcggtgcgggtggcccgcaacctcacctgcgaggccgattcctcaccggtgacatacagcgtgcggtgcccggcccgcgcccattgcgccgccacctcgagcagcagggtcgacttgccgacgcccggctcgcccgccaacaacacgacgacgccgggcaccaggccgccaccgagcacgcggtcgagctcaccgatcccggtgagatggcgatcggaggcctgcgccgacacctgggcgatcggcagggcgcgcgtggtgggtgccgacgtccgcacggccgtgctggtcgacaccgaggcgccgcgctccaccaccgagccccaggcctggcactgcgggcagcgcccgacccagcgcacgccggtccaaccgcattcggtgcactgataggagtcctgctgtttcttggccacgcgtcaacgctagacggcgcctgtgacacttctgccgcaccggcccggacgcggcggatagggaaccatcccgaggggcgacactgacccagggaatggctcgttcatgggtgcgtcagatacgcacgagtcccctttcgggggtggagaagatcgcggcgttgatgcccggatgcgcgttcggcgaggtgaactcgatgttcacgccgtcgaacacatcgggcagggcctcgcccatccagtcctcgatgcgctggcgcgagccggcgatctccaacgaggccagggcgatgtcgccgggcagcgccgacggcagcacgtctgccgggctctcccacttcacgaaatagggcagctgggggtcgctcatcaggcccttggcgccgatctgctcccacttgagctcccggccgtcggggaaatggcgcgaaccgggcacggcgccgcggtcgaggcgttcctcgaagggtgccaggtcgtccaccgagatcacccagccgagccagccaccgccctgctcggagcgggcccgcactgcctggccgtagacggccttctcggcgacgggatggtcaagcacctcggccacctcgaggtagcggtccttgagcaggggcaggatgttgttgcgcgtaccgaaccgaggatgaaatccgccgtccttgaactcttcgcccaggagctcgcccaggtgtttggcggcgacctcaagaccttcgggaccggcggcgaacgtcagatggtcgacatgcatggcctcattgtgtcaagcccggcgcctgatcgcgaaaccgggtaccctcccgccgcgtcatcggccgtgtcagcggctgtcttatcgactgtgttgcccgggcccgcgcccggcatcgttgcgcggtgccccaggggtcccgacatgggtgccgacgagcggccggggcggggacgtcgcagtgctccccggcaaccccccggcgcgatgtgatccggtggcgatccggacgtcgccgcacaccgggttggatcggtgttctaccgtggaggtgtggtcagtaagccccttcccgacgcgtccggaagcaagcgtctgtccgtttccctgtccacctcgagctgttaccccgagcacaccgcggaggcattcgacattgccgcggaagccgggtacgacggcgtcgaggtgatggtgggcctcgacgcggccagtgccgatgtgccgtacctggcgcgtctggccgcccaatcgggcatgcccgtggtgtcggtgcacgcaccctgcctgttgctcacccagaacgtgtggggccccgatccgtgggacaaggtgcgccactcctgcgaggccgccctggcgctcggctccgatgtggtggtgctgcacccgccgctgcgctggcagcgtgaatacgccgccgggttcgtggccggggtgcgcgacatctcggagcacaccggagtcaccatcgcggtggagaacatgtacccatggcgcacccccgggcgtgccttccaggcctatctgcccagctgggatcccaccgacctcgactatgacgcgctcaccctggacgtctcgcatgcggccacctcgcagttggacgcccttgagctcgccaggacgtggggtccgcggctgcgccacgtgcacctgaccgacggcgtcggcctgcgccgcgacgagcacctgttccccggcgagggcacccagaacgtgtggggcctgctgcaatacctcaatgacagccccttcgacggccgcatcgtgctcgaggtgaacacccgcaaggccgacaaccacgccgaacgggtgcgtgagctgcgcgaggtggccgacaacacccgcctgcacctgggccagctcgacgcggcccgtcccggcgcctccccgacgtcctgagatggcggccccaccaccgccatccctgccgacgcgggggccagtgtcggctgatgggtcgctgtcggcccccatgccattgtcgggcgagtccgcaccattgttgggtgacggcgcccgtccggcccgccggcgcgtccggctcggcctggagaccttcggcctgctgtcgctgtgcctgggcaagtcggccgtctactcggtgttgtcccttgtgaccagcctcaccgtgggcccgaagctcaacgagcagaccaccaccatcaacggcgccgtcacccccgatcggccctggctcgacgtggcctacaagcttgccgacgacttcttcctcatcgtgccggtggtgttggcgatctacctgctggcgtcggtgcgccggcccggcccgtcggtgtggcgggcgatcgggctggacggcctgcgggtgcgccgcgacgtgctggtgggcgtcggcgccaccgccgcagtcgggatcccaggcctcggctgctatctgctcggccgcgaactcggtctcaacaccaccatcaacaccgccggatcgggggcctcgctggccgccatcgccttctacgtggtggccgcggcagccaatgccgggctcgaagagatcgtgatgatcggctacctgatcacccggtggcgccaggccggctggaacgcctgggcggcgatcgtcacctcggcgctgatccggggcagctatcacctctaccagggcttcgccggcttcatcggcaatgtggtgatgggcctggccttcggctggtactggcagcgcaccaggcgcctgtggccgctcatcgtggcgcacaccctgctcgatgtgttcagcttcgtgggctatgccctgctgaagaacgtgtggacctggttgtaatgaccgcggtgtggtgactgcggcgttgtagcgactgccaggttgtggtgaccacgacgtcctcccatgtcacatcgggagcacaatcgaaggggacagcacacgcgtgggcgtgctcgacgcagggcccgcgcgggatgtgatcgggggagggaacacgatgcgggctgaacgggtgcaggccttcagcgatggcgtcttcgccatcctgctgaccatcctcgtcctggagttcgtcgtccccgactaccaggagggtcatctcttcgaggcgatcctggggcaatggccgatcatgttcgcctatgtgctgacgttcacctatatgggcgtggtgtggctgttccaccacgacctgttcgcctcggtgaagaccacctcgatctggctcaacatcctcaacctggtgctgatcttcgtctgctcgttgctcaactacgccacctcgctgctgtccaccgccatcgccaccggaaatggcaccgatatggccgcggccttcggtatctacgacgtgaatgccatggcgatctcggcggcgttcatggtgctgtacttctacctgcaccgccacccgaagctgtattcctcgccggtcttcgacggctatttcggctggatgtcgcgcagcgccggaatctcggtgctgatctacgccctggcactggccgcgaacttctggagcatccaactcggggccgcgctactgatcggtggcgtgatcttccacgcgctggcctacgcgggctcggcgcacagctatcggcgcagccggcgcaaggtgctgcgggaggcccggcggcaggccctgaaggacgcccccggccccgaatccgaacccggaccgcaatccggtccgccggcctgaccctcgtcagcgggagccccgcccggctgcggagccaccgatcaggcgagacaccgcgacccgtttagggcaaggaagtaggctctggggcatgcgagtaggtgtctttggagcaaccggtcaggttggcggtgtgatgcgcacgcttcttgccgagcgcaacttccccgtcgatgaaatccgctattttgcgtcgtcacgcagcgcaggtcgccatctgccctggggcgataagcagatcgcggtggaggacatggccacggccgatttctcgggccttgacctggcgatcttctccgcgggcaagaccgcgtcgaaggagtacgcgccgaaggtggccgcagccggcgccgtggtggtcgacaattcgtcgggctggcggatggaccccgacgtgccgctggtggtcagcgaggtcaaccccgaggacaccaagaacctgcccaagggaatcatcgccaacccgaactgcacgacgatggccgcgatgccggtgctgaagccgctgcacgatcgctggggcctcaagcgccttgtggtcgccacctaccaggccacctccgggtcgggcctgtcgggtgtgcgcgccctggaggaccagacgcgcactgccatggcagacgacccgcacgggctcacgttcgacggccacgcggtgccctatccggccgataccgccccctatgtgaagccgatcgccttcaacgcggtgcccttcgccggcaacctggccgacgacgactccctggagaccgacgaggagcagaagctgcgcaatgagtcgcgcaagatcctgcacatccccgggctcaaggtggccggcacctgtgtgcgcgtgccggtgttcaccagccacggcctgtcggtgaatgccgagttcgagcaggaggtcagcgtcgacgaggcgcgcgccatcctgtccgcagctccgggcgtcgagctcgccgaggtgcccacctcgcgtgacgccgccggcgtcgacccgagcctggtgggacgcatccgcatggaccagtcgctggacacccccacgggcctggcgatgttcgtcaccagcgacaacctgcgcaagggcgcggcgctgaacgcgatccagatcgccgagctgttctgcaaggtggcctgagccatggccctccgcaccccggcagcgagcgttgaccgcgtccatcggctggcctttctcggggccggcaccatgggcggcacgatcgttgccggcctggtgcgggccggccgtgacgccgcgggcatcgccgtcaccacccacaccccggcccatcgcgagaagctggccgccgagctgggcgtgcaggccttcgccgacaaccgtcaggccgccgcgtgggcgtccacgatcgtgatcggcgtcaagccggccgacgcgttggcgttgctcgacgagatcagccccgaactggggcccgacaatgtggtgatcagcctgtgtgccgggctgagcaccgacctgttgtcggcacacctgccgccggccgtccacgtggtgcgcgtcatgcccaacaccccggccagcgtcggggcgggcatggcaggcgtctccggcggccgtacggccaccgagcacgacgtgcaggcggcgatcacgctgatgtccgccgtgggcagggccgtggcgatccccgagcagctgcaggacccgctcaccgccatctccgggtcgggtccggcctatgtcttcgccttcgtggaggcactcatcgaggccggcgtcacccagggcctgccgcgtggcctggccaccgagctggcaacccagacgctgctgggctcggcgcggctgctcgacgagggcaacgattcggtgacgcagctgcgcgaggcggtcacctcgccgggtggcaccaccgccgcggcattgcgcgagctcgacgatcacggcctgcgctccgccgtgcaggatgcggtggaggcgtgcgcccgacgcagcgcggaattggcggccgccgccgagcaggccgacgcccgatagtcgttttcctccgcgggtggacgtggggctgccacgtggagatttcacccggtctggacactcagggtagactttcgttgttcgtcggagtccggtctgcgcccctggtgcggattgccaacgcaacagctggtgttattggttccttgtagccgagtcgccgtgcgctgagcgggacgccgaaggttttccaggtcataggcccaccggacgcaggttcggtaggtcgagattcatcgggcgtaggtccgaaacacgaaaggtccactgtgggttcggttatcaagaagcgtcgcaagaggatggcgaagaagaagcaccgtaagcttctgaagaagacgcgcatccagcgccgccgccaaggcaagtaagtgcacccggccgaacgcccaaggtgaattcggcggatgccagccactggctctgacacccccatccacattggtcacgttcggctgcccccttgattcggtaaaggcgagccgtcaatgagtcagcgagtcgatgtcgaagcccccgacaatgcggggccggacgatgtggcaggcaggttgtgccatgggcgtgtggtctttgtcggtagcgggctctcgtcggctgatcagttgacccgtgccggcctgcgggcgctcagcagcgccaccatgctggtgaccacgccggagcttcgcgagatgctcgacgaggccggcgtcgaggtgcccgacaaggacgcgacgcgttttgtcggcgaccttcccgatgtggcccgcttcgtggtcgaggccgccggcgacgaccagtcggtcgcccgcttcgtgcgtggcgatcccctgctcgagggcaatatcgccgacgaggtcagcgcctacatcgacgccgacctgatgcttgacatcgtgccgggcgtgccctcgctcacctcggtgaccaccctggccggggtcagctttcccgggcagtcggtgcaactcatctccctgccctatcgcgccaagaccgctgagatcccggctgcgggttcgctggcggtcggctgctattcctcgcaggccgccatggtggcccgggcggccgtcgaggccggacgcacccccgacgaggacgtgctcatcaccttccacggtggcaccctgcgccagcactccgagatgtcgaccatcggcaccctgatgggcaagaagagccccattgaacccggcgatgaccgggtctcgatcgtcttcggcaaggcctcccaccgccccgagggcatgaactggtacgagtcgaagccgttgttcggctggcaggtgctcgtgcccctcacccgcgatcgcaatgaggaactcatcgagcgcctcagcctgcacggcgcccactgcaccgaggtgcccaccatcgacgtggagccgccgcgcaacgccgcccagctcgaccgcgccatccgtggcctggtcgacgggcactaccagtgggtgatcttcaccagcgtcaatgcggtgcgtgccgtggcggcgaaggtggccgagtacggactcgatgcccgctcgctgtcgggcctgcagatcgccgcagtgggcgacggaacccgcgaatatctttcgacgtggggcctgattcccgacctggcgcccactgatgtgcacaccgtggccggtttggccgcagaatttcctgcctacgacgacatcgtcgatccgatgaactccgtgctcgtgccgcgcgccgagatcgccacggagccgttgtcggagggcctggccgagttgggctgggaggtcgacgacgtgaccgcctaccgcacggtgcgcgcctcgccgccgccggccccgatccgcgaggccatcaagtcgggcgatttcgatgcggtggtgttcacctcgagcaccacggtgcgcaatctgatcggcattgccggcaaaccgcacgccgccaccatggtggccgcgatcggcccggccaccgccgtcacctgcgaggagcacggcctggacgtcgccgtgatctccgacgcgcccggccagatcgaactggccgattccctggcctacggggcgcgacgccgcgccaaggcactcgtcgaggccggcaagcccgtgaagcgtccctcgcagcgacgtcgtcgccgcacgaacaagtcatagggccccgccgcggcccacgggcccgggcgagtgggcggaaggatcggagaaccagtgggtgaccagcagaccatcgtgcacgtgatgcgccatggtgaggtgcacaatccgcaggccgtgctctacgagcgcctgcccggctaccacctgtcggacaacggctcccggatggcgcaggtggtggccgccgaattcgccgatgtgtcgctgacgcacctgcgcaccagcccgctgctgcgggcccgcgagacgatggcgccggtggcggccgagcatcccgggctgcaggtgcactacgacccgaacctcatcgaggcgggcaacaagttcgccggcatgaagttcggccggtacaagaccgcgctggtcgatccgcgcaattggaagctgctgcgcaatccgttcacccccagctggggcgaatcctatgagcacatcgcgcaacgcatgcgcaccgcgatcatcgactccgcacgcgccgccggccccggcggccaggccttcgtggtgagccaccagtcgccgatctggatcgcgcgcctgtcgttcgaggggcgtcggctgttccacttcccgtggacgcgcaccagcacgctggcctcggtcacctcgttccacttcctgggcgacgagtgcatcgacatcacctactccgagccggccgcccacctgctgggttccgacgggaacgccgccttcagctccggcaactgaccagccggccaccacggatcccggccccgcccggccggtggcgccggacgcgggtggcgtcaacgcgtgggccgtgccgcatgccgcccttcggcgcgcgtgggaggattggggcatggcaactgagtcttctgggggaactgggctttctggggcgggccggcattccggcggcggggcgtcggatcacttcgacctgtgcatcatcggctcgggttcgggcaacaccatcgtcaaccacgaattcaatgactggtcggtcgcgatcgtcgaccagggcgtgggcgagggcgaatggttcggcggcacttgcctgaacgtcgggtgcatccccaccaagatgatggtggtgccggccgacttcgcggcctcgcccgaccgtgcggccaggctcggcgtcgagctgagccgcggtgcggtcgacttcgccggcatccaacagcgcgtcttcgggcgcaccaatgcgatctccaccgacgggctggcctatcgcgagtcgaacgagaatgtcaccgtcttccgtgaggcggccgccttcatcgacgccaagcacctgcaggtgggcgaccgggtgatcaccgccgaccagttcgtgctggccgccggctcgcgtccgcgcaccctggacgtgcccgggctgaacgatcccgacctggccggcctcatccacaccaacgacaccctgctgcgcatcaagacgctgcccaagcacctgatgatcgtcggcgggggcgtcgaggcgctcgagttcggccacatcttctcggccttcgggtcgaaggtgacgctggtgcaccacggcgcgcgcctgctgcgcaagctcgaccgcgacctgggggaggccgccacgaagctcgccgccgaacgcttctcggtgcggctcaaccagtcgttgagcaatgtggaggcctccgagaccggcgggctcatcgtgtcgaccagcgattccgacggcatcgactacgactatgcggtggacgcgctgatggtcgccgtgggacgtgagcccaacggcgacctgctggaggtgggcagggccggcgtcacgctcgacgaccagggcttcgtggtggtcgacgaccagcaacgcaccagccagcccggcatctgggcgctcggcgacgtgacgagccaccacctgctcaagcacgtggccaatgccgaggcccgcacggtgcagcacaacctcgtgcaccccgacaacatgatcgccacgcgacgcgacgcggtgccccaggcgatcttctccgacccgccgatgtactccgtggggccgaccaccgacgagctggacgcggccggcacgcactatgtgagcatcatccagccctattcgacggtcgcctacggctgggcgatggtcgacgacgacagcttcgtgaagctggtcggcgaccccgccaccggcaagctgctcgccgcccacgtggtggggccggaggcccccgagctggggcagctgtgcaccaccgcgatcagcttcggaatcggcgccatcgagatggcccggggccagtactgggcccatcccgagctggccgaggtggtcgagaacgccctcatctcgcttgaccgggccatgcgccacgacggcgacgacgacagtgagcaccggcgtcgcaccggggaaggctgagccggctgccggcccctgtggagagcacagcagagagcacagtggagagcattgtggtgaccccccgaaatccccatcgatcccaccgtccccgcctgcgccgggcgtcccggcttgcggtgttcggcatggcgcttgccctggtgacggcctgctcggcctccccgggaggcgcgggaggatcgacgtccgcccgcgactccacatcgggcaccacgagcccgtcggcgagtgccgcgtcgggcgccagcagcctgccgccacgcgcatgccttgatgccgcgcgggcgatggacccgcaggcgcgcgtcgaactgctctacatgggatcggtcaccgccaccacgcccgcggccggtgccgggcagctggcgaaccagccggtgggctcggtgatcctgatgggcgacccgggcagcctgcaggcgaccagccagctgaccgacgccctgggcgccgcacgtcccgggctgctgatcgccaccgaccaggagggcggccaggtgcaacgcctcaccggcccgggcctggaccagatgccctcggccaggcagcaatccaccctcgccaccgacgccctgacccaacggtggaccagctggggggcccagctgcgccgcggcggggtgcactacaacctggcgcccagcgccgacctggtgccgagggccaatcgcggcgcgaacgcaccgatcggccagctcgaccgcggctacggcgccacgcgcgccgacgtcgccaccaatgtgacggccgtgttggccggcatgcacgccggcggggtggtgggcgcggtgaagcacttcccggggctggggaatgtgagcgtcaataccgatttcggcgcggcccatgacgccgtcaccacacctgattccgacgaactgaacaccttcgccgatgtgctcgccggagcggattcggtgatggtcagctcggtggtctacgaccgcatcgaccctgccggaccggccgcgttctcctcgcgggtggtcagcggcctgttgcgcgagcagctgggatattcgcgggtgatcatctccgacgacctgggtgcggccgtggccctggccgactatccggtggcccaacgcggcaccctgttcctgcgcgccggcggtgatctcgcgctggacgtcgacccggcgagcgtgccggccatggttgccgacacccgcgccgccgtggcggccgacccggacttcgcggagcagacggtggcgaaggccgcccgggtgctccagctcagggccgacgccggtctggggcagtgcggcgcctgagcccgggtgccctgtatgggctgaccacgggctcgcccctgcacagcagcaggtgcaagcccacggtccgggcccaatgggactacccagccatgctcccgaccgtgtgccgtgccacggcgcgaagcgcatccagccctaccggcggtgacgcgagataggccacctgggcagttcgcgggcagttgcttcgcgctgcggcgatcggcgcggtctcggcttcgatgcggcgttgcaggaaggggtcttcggtgtccgtggcgctcaacgaacgattgatcacccaggcccagggacgaatacctgcccgctccaagtcgtcctgaaggccgctggcctccaacacgggggtggtttccggcagtgtggcaatgatcaccgccgtgtgcccgggatcacgtaggcgcgtcaggggcgtcgtcgacgccagctcggggctgttgcgggccacctcacggtgatacgaaccggtggcgtccatcaggagcagggtgtgccccgtgggcgcggtatccatcacgacaaagcggtggtccgactgttcgacagcctgtgcaaacgactggaagactgccacttcctcggtgcagggcgagcgcaggtcctccgccaggtttgcgcggccctgttcgtccagggaggcgcccttggtggccatcacatggtcacggtattggcgggtggccacctcgggatcaatgctggtcacgtcgaagggtgcctgtccggcgatggtccagtcgaggtgtgcggcaggatcggtggtggtgagcaacacatcctttctccgatccgcaaggcccatggcgagggcagaggcaagggtcgtcttcccgactccgcccttgcccatcaccatcaccagaccgtggtcgcgttgcgagagctccgcgatcagttccgaaagctgggggcccgccaccgagggtctgcggggctggttgacgtcaacgtcggaatcttcggtctgcgctgtcgatgacagcagggtccgcagggcgtcgacccccaccatgtcgccgtggcgcaactcgagggtgtcagtcacgagtgcacgtagcctcgcgggtgcggagccgatggcctcggattcctggtgggaaatggatcgtgcgagcgcgtcgtcgctgtgggcgcccggcaacagcccgttgatcaccaggtgggttgccgcaatccccgcctcgagcaactcgtcgaaggtgcgggatgcctcgtgcagggaactctcctgggcacgtgccaccagggccagccgggtccgtccggggtcggccagcgcgcccagggcttccgcatagctgtcgcgtgtcttctccaatcccgacatcggaccgaggcaggaggggtcgcccagaccgtcggacaggaactgcgaccactcgcccggcaacttgagcaggcgcacggtgtggccggtgggcgcggtgtcgaagacgacatggtcgtagcctgcgccggggccgtgagcggtgagcaggtcagtgaactcattgaatgcggcgatttcggtggtgcatgagccggacagttgttcggttgccgaggccaggtccttggcactaagaaagtcccgcacgggcgccaaggcgcgcgctcgatactcctccgcagctgcctgtggatcgatctcgagcgcatccagccccggcagggcagagatggcagtgatgtggttgccgatctcctgaccgaagacctgcgcaacattggacgccggatcggtggacacgaggagcaccttccggccggccgatgccaacgccaccgcgctggcacacgccactgatgtcttacccacgccgcccttgccggtgaggaacaggaagcggggcatctcttccagcaggtgcgtcacagctgcaccgccgagccggacgtgttctccagggggagcgcctgcggggcagatccgccgcagcaggacgagccctcggtgctgggccccgtcgaatcgttgttgctgccgcagcaccccggggcattggctccggctgcgtcacccgaacagcagccggcagcgctggcgagtcccgcgaagaccgccagctcctcccgcgagggatagcgattggtcgagacggccacgccatcgaccaccacgagggggaggccatcggccccggccacctgcatgaaggcgcgggccaccggggaaccggcgaaggctgccgggtcctgggccaggttggcccgctgcacggtgacgccctggcgacgcagccagtccagatcggcggtgaagttgaccagtgcttggtcagggtcggtgccgcacacgccggtgttgcagcacaggggtccttcaaatacggagatcatccggttcatccttcggtcggatagatagaaaccttccgatatgaaacccaagcactcatatagacaactgtcaatgtgacgggtagtctggcggccatggcgactgaactcacggcaaccgggactcctcgttcaacgagcgaggcgttgtctgcggaacgggccgaccgtgtggcggaggtcttcaaggccttgtctgatccggtgcgggtgcgcctgatgcatcacatcagcgccaattgctgctcgtcggtgtgcgtatgccacatgcccgctgacctcgggatcacgcagccaacgctgtcgtatcacctgacccggctgctcaaggcgggcctcatctcgcgggagatgcggggcaagtgggcccactacacggcgactgcgcatggactcgatgtcgtgcgcgccttcatggatggcttgggcgccgttggtccagggacgtgcgacgcgacagactgctgctgatgtcggccaccggggcccgacgcgtgccgtccatcatgtttgtgtgcgtacacaacgccggccgttcccagatggctgcggcgctgacgcgctgcctggcgggtgatcgggcggaggtacgttccgcaggaactgcgccggccagcgagatcaactcccaggtcgtggccgccatggacgaaatcggcatcgacctgctggggactcgtcccaaggtgctcactgctgacgcagtacaggaatctgatgtggtcgtcaccgtgggatgtggggacagctgcccctactatccgggcacgcgctacgtggattgggcactggacgatccggccgggctgtcgctcgctgaggtgcgacccatccgcgatgagatccggaagagggtcatcgccctgctggatgagctgggcctccacccggaccgaccggggatcagccgaagcgaccggtgatgtagtcctcggtctgggcctcgtcggggttggagaagatcgtctcggtgtcgttgtactcgatgagatggccgggcttgccggtgccggcgatgttgaagaacccggtgcgttcgctcacccgcgcggcctgctgcatgttgtgggtgacgatcaccaccgtgtagtcctccttcagctgctggatgaggtcctcgatcgccagcgtcgagatcgggtcgagggccgagcagggctcgtccatcagcagcacctcgggcttcacggcaatcgcgcgggcgatgcacaggcgctgctgctggccacccgacaggctggagcccggacgatcgaggcggtccttgacctcctcccacaggttcgagccgcgcagggaggtctccaccacctcgtcggcctccgacttcgacaggcgacgcttgttcagcgccagcccggcgagcacattgccgcggatggtcatcgtggggaagggattgggctgctggaacaccatgcccacctgacgacgcacccgcaccgggtcgatgtgcttgccgtacaggtccacgccgtcgagcagcacctcgccctcgaccttggccccgggcgtcacgtcgagcatgcggtccagggaacgcagcacggtggacttgccacagcccgagggcccgatgaacgccgtcaccgaacgcggctcgatcatcatgtcgacgtcctccacggccttgaaatcgccgtagaagatactcagcttcttcaattcgatgcgctttgccatgacgtcacttcctactggtgtggggcgcaaacctggcggcgatgagtcgcccgagcaggttgagcaccatgacgatgagaatgagggtgagcgcaccggtccaggcgcgcgcatagtagggcgcctggggcacgccgggggtcatgtactgcttgtacacgaacaccggcagcgtcgccatggcgccgttcacgggatcgggattcttccagtcgacgaagccggccgtgatgagcagcggcgcggtctcgccgatcacgcgggcaatgcccagcacgacgcccgacacgatgcccgacagtgccgtggggatcaccaccttgaggatggtgcgccacttcggcacgcccagcgcatagctggcctcgcgcagcgacttgggcaccagctgcagcatctcctcgctggagcgcacgatgtaggggatcatcagcacgcacagggcgacggcgccggtgatgcccatggtggcattggccaccccgaccaccagcacgaacagcgcgtaggcgaacaggccggccacgatcgaggggatgccggtcatcacgtcgacgagcagcgtgatcgcactggcgagcttgccgcggccgtattccaccaggtacaccgcggtcagcaggccgatgggcaccgagatgagggtggcgatggcggtcacgatgagggtgccctgcacggcatggccggcaccgccgtcgtcaccgatcacgccgtacatgctcttggtgaagaactgccagtcaaaccgtgccgcaccctgtgacacggtctcccagatcagcgagaccagcggcaccagggcgagtaggaaggccagcgtcaccaggtcgcgggcgaagcggtcgaaggcgcggcggcgtccctccaccgatcgcgacaccacatagtgcagcgccaggtaggcgatcaccgagatgaccacccacgacaggatcgagaagctgtgggcgagctggctcaccaggaacacgcccaccacgcacaccaccagcaggccgatggccgtgaacggtggcaggtgcccggcggtcagcgaatcgctgaactgcaccgcatcgctctcgcgttgcgagctggcgcgtcgcgcgcccggacggcgggcggactcgtcgccggcgccgtcgtgggtcggatcggattcgatcaattggtcagtgctcatccgtttgctcccgagaaatcggcgcggcggtggatcacccaacgggagatggcgttcaccgcgaaggtgatcacgaacagcagtagcccggtggcgatcagctggttgagttccagcgcattcgcctcggggaaggtcgaggcgatgttcgccgcgatcgtgcgcgagttctgcgaggtgacgatgctgaagttcaccaggcgtgagcccgacagcaccatcgccacggccatcgtctcgcccagggcgcgtcccagggccagcatggcggccgagatgatgcccgactgcgaatagggcagcaccacctggcgcaccatctcccagcgggtggcgcccagggccagggaggcctcgatctggttcttcggcacctgcaggaagacctcgcggcacatggcggtgatgatcggcaggaccatcacggccagcaccacggcggtggtgagcatggtgcgtccggtgcccgacacccggccgctgaacagcgggatgaacgacaggtgctcggtgagccacaggtgcaccggctgcatgaacttggcgagggtgttgatgccccacaggccgtagaccaccgacggcaccgccgccagcaggtcgatcacatagcccagcccggacgccagctggcgcggggcgtagtgcgcgatgaacagggcgatcccgatgcccagcggcacggcgaagatcagcgccagcaccgacgagtagatggtgccgaacaagaagggacccacgtacttcagcgtgttgccgaagggcagggccttgccggtgaacgcgggcagcgcctgccagatcaggaagatcgccaccgacgccaggatcaccacgatcaccaggccggcgcccttcgacagtccggagaacaccgtgtcgccgccccgacgaccacgggtggtcagggcggcgagttcgtcggcaggcaccgggcgttcaccgggtgcctgcctcagcgaggtggtcgtactcatttaatcgaatcgatcgagccctgcaccttgccggccagggcgctcgccagcggtgcgctgccggcggacttctcggcgtcggcctgtccctcagagctgaccacatagcccaggtagctcttcacgagctcggcggtgtgggagtccttgtactgctcgcagaccagcgcatagctcaccagcacgaagggatagccggcctgggtgcggtcgagcgcgatcgcctggtcgttggccgggccaccggtgcgtgccggcgagccggagaccaccttggcggcctcgtcgccggtgggctgcacgaagttgccgtccttgccgtaggagaccacggacagtccggacgcctgcgacatgtcggcgtagccgatggtgccggtgccgttcttcacggcggccaccacaccggaggtgccctcggccgactcgcccgagtaggcggcgggccaggtctggctgggcttctcggtccacacgttcgacgcgttctgcgacagcgtgtcggtgaagttctcggtggtgcccgacttgtcggagcggtgcaccacggtgatggcggtgtcgggcagcgtctcgccggagttgagggcggcgatggccggatcattccacttggtgatcttgcccgagaagatcgacgcggcggtggtcgcgtccagcttgaggttcttcacgccgtcgacgttgtagaccatggcgatcggtgagacgtagatcggcaggttgagcgcattggacgattcggcgcagccggcgaaggagctggccttcatggcgtccagggacagcgcgtcgtcggagccggcgaaggccacggcgccgctggtgaagtcgctggcgcccttgcccgagccgccaccgttgtagctgaccttgatgccggcctgcttcttggtgaacgccgagcgccaggtggtctgggcggattcctgggaggttgctcccgagccgacgatctcgccggacagtccgccgctgctggacgcggaactggcgggtccctcgctgctgcatgcgctgaggccgagcatgccggctgccagggcggcgacgaggatcctgctcttgagtgacacgtggttcattggcacgcgggtttccttcatcgatctggaatcggccatcacggccgaggggagcaatcctgcccgccatgaatcgacggtagagggccaaggtggccgcaatggtccggcaaggtaaacagccggtaaacatgtccgaccgctgcgatgacgacgcccgcaatgccgcgtcagcggggcgcgcacccgcgcttcacaggggtgagggataggactccacggccaccggttcggcctcatcgccgatgtgcaacaccaaggactgggcggtggtgaggtgctggatgggaatgtgcagccccgcctgcatggcgcccagcacggggcggtggccacagaccaccagtgggtcctcggggctctgcgccacctgcacgcgcagctgccacatgaggtcggcgatctcctcgtcgcgtcccagcgccgcctcctcgctgagcaggtgcaccggatggatctgggagccgatggccttcgcgaagggctcgacggtctgcaggcagcgggtggaggtgcttgacagcacgcggcgcaccccgaaggcgtccagcagcgccaccaaccggtcggactggcgcgcgccgcgggccgccagcggacgcagccagtcgtcgccctgccagctcttgcggggacgcgccttggcgtggcgggtgatcaccagcgtgcccagggcccggtcggccagcgggacggcccgggccagcagttccacttcatcgggataggtcagcagctcggcggcctcgggcagcatcggccaggcgatccgatcggtctcgtcatcgcgatgtggatgctcggggcggttctcgtggcccagccagaagtgcacctgcttgggtccggcactcacgtcgtagcgcaacgaggggagcgggaggcccagccgtacgtggatcccggtctcctcctccacctcgcgcaccgcggtgaccggcagctgctcgtcgccatgcggcttgcccttcggtaacgtccaatcgttgtagtgggggcggtgttccacgagtacgcgccgttgttcgccggagccccggaagaccacggcaccggctgcgacgactgcgggcttggcggtcatggcctggggagcacccccggacgctggaagaacagggtgcgccgtgacggtccgtcgctgggggcgtgcctgcggtggctgaccacgtcgatcaggtgctcctgcaggtcgagcttcggctcgccggcggcgttggtggtatcgggatgccagctgcggtcgtcgagtttccagttcacggtgcccgggtcgaatgccaggtcgaacagctggccgatctcggcgatgtggttggcgtgggtgatcagcacgatcgcctcgacgcgccggtcgaggttgcggtgcatcaggtcagcggagccgatgcccaccgaggggttgccggcgttctcgaaccagaacagccgcgaatgttccaggaagcggcccaggatcgagatcagccggatgttctcgctcaggccggggacgccggggcgcacaccgcagatgccgcgcacccacaggtccacctcgacgccggcacggctggcgcggtagagcgcgtcgatgatgcgctcatcgacgatcgagttcaccttgatgcggatgcgtgccggcaggcccgccttcttgttcgcgatctcacggtcgatggcggcgatcaggccggtgcgcacaccctgcggcgccaccagcaggcgccggtagtgcgtctcctgggtcatgcccgacagatggttgaacaatctggccacgtcgtcggcgacgatcgggttgcaggtgagcaggcccatgtcctcgtactggcgggccgtcttggggttgtagttgccggtgccgatgtgcacatagctgcgcagcccctcggcctcatcgcgcaccaccaggatcagcttgcagtgggtcttcaggccgaccatgccgtacaccacgtgaacgccatggcgttcgagcttgcgggcccaggcgatgttgttctgctcatcgaagcgggccttgatctcaaccagtgccagcacctgcttgccggcctcggcggcctcgatgagggcgtcgatgatgggggagtcgccgctggtgcggtagagggtctgcttgatcgccagcacatgggggtcggcggcggcctgttccaccaagcgctgcacactggtggcgaaggagtcatagggatggtgcagcaacacgtcgtgacgccggatcgccttgaacaggtcggcctcgctggaggtctccacgggtgcgaggtcggggtgcgtcttgggcaggaagttcgagtacttcaggtcgtcgcgatcaacgtcggtgagccggaacagggccgtcaggtcgagcggtgccggcagcttgaagatctccttggggctcacgtcgagctcgtcggcaagcagctccagcaggtcgtcctcgatggtgtcctccacctcgaggcgcacgggggagcggcccaccttgcgccgcagcagttccttctccagggcgtagagcaggttctcggcgtcgtcctcctcgacctcgacgtcctcattgcgggtgacccggaaggtcgtggactgcagcaccttcatgccggtgaacagctccgacaggtgggccaggatcacttcctcgaggggcacgaagcgggtgtcgcccagcttgatgaagcggtcgaggatcgagggcaccttgatgcgggcgaactggcgggcctcggtgtcggggttgagcaatagcacggcgatgttgagtgacagcccggagatataggggaaggggtgcgaggggtcgaccgccagcggggtgagcaccgggtagatgcgttcggtgaacagctcgttcatccggtcgtgttcggcgtcggtgagctggttccaacgcaccagttcgacgtgctgctcggtgagttcgggcagcacctcctcgtggaagacccgcgactgctcggtgaccagctcgtgggcgcgggtgaggattgcgtcgcgcagctcccggggcatcatgccggcgatggagcgcacggccacgccggcttcgatgcgtcgcttcaggccggccactcgcaccatgaagaactcgtcgaggttggaactgaagatggccaggaacttcgcgcgttccagcagtggcacgcgcagccggtcgcgggcctggtcgagcacgcgctcgttgaacgccagccagctcagctcacgttctgaataccggtcggggggaagctgttcgtcggcgctctggtcagcgctggttgcgtcccggtcgccggggcctggggcattgctcatgcgtcgcgctcctggggtgaggactggcgcccgtggtcctggtggcgggccggcttggcaggtgcatagccgacatcggtggagaccacggagaaacctgctcgttcatacatgtgcaccacgcgttcgttggcgccttccacatagaggtcgatggcctcgacgccgagctcgcgcatatgcaggataccggcatccaacagggcgcgtcccacgcccttgccctcgaagtccgggtcgacgcccagcacatagacctcgccgcgcggacgaccgtcctcgtcggccaccttggtccagtggaagccgaccagggtgccggcctcgtcgcgggcgaccagcagtccggctgggtcgaaccagtcctgggccatccggttgcgggcgtcctcggcggtcatcgcgccctgctcgggatggtgggcgaaggcggcgtggttcaccgccacgagctggtcgaggtcgtcatcgcggaagtgatcgaggcgcagtccctcgggcaggtgtgcgtcgtggggctggtcggcgggcatcggcaggctcatcttcaacagcttgcgcacctcgcgcaggcccaactgggtggccagttcgcgcgcaccggggcagtcgccgaacgaccaccacatggccgggtgcagctgccaggccgccttggccagggtcgtggcgatgccctggcgccgtgccgggggcgccaccatcagctgcacggtgtgctcgcgggcgtcggcctgcgcgtagcccaccacctgtttgccgtcgcgggcaatccagtgcgtgtgcgacgccgtgagcccctgcagcccgaaccagccggactcgttgaggggcgatactccgtcgtgctcggtgcaggcccgcaccaggtcggcgatgtgatcgcggtcgtcggcgctgagacggataatcggaccagtcaccacggggttcataccccaagcctagaagctggcccggccggtgtcgccgatctcgccgagtggtgggcacccattcgtccccattcgtccccgtggcccggcggggtccggcggcgcgcaccgatagcagtgaatcctcccgggcccctgctcgcatgccgatgccttcataggctggcgccccgcggtcgcaggattgcgacctccaactgaggggcactgcatgaagattctcattaccggtggcgcaggctatatcgggtcatccgtcgcggcctgttgcgcagataatgacatcaccccggtcattctggatgactacagcaagggcctgagggaattcgccgcgccatatctgaactatgagggggatattgccgacgttccactgatccgacggatcctgtccgagcatcccgatattgatgcggtgatccactgtgccgcgaagatcgtcgtgcccgaatccgtttccgcgcccctggactactacgagaacaacgtttccaagaccctcgtcctgttgcgggagctgtgtgggcatggtgttcgccgattcatcctcagctccaccgcgtccatgtatgagggtggggacggccacctggtcgacgagtcgagcgcagtggtcccgcacagcccctactccgcgtccaagtggatgctcgagaggatgctccgcgacctcgcggccaccggtgcgatggaggtggttgcgctgcggtacttcaacccgatcggcgcagacccgaagatgcgcagcggcctgcaggatgaacggccgacccatgcgctgggcaagatgatcgaggcctaccagggcggtgggacgttcaccgtgacgggcactgattggcccacgcgtgacggttcggggctgcgcgactatgtgcatgtctgggatctggcccgggcccacattgccgcgctcgaatgctttgattcggtgatgttgcaggcgcaggtgcccggctttgacgtcatcaacctcggcagtggcagggggaccaccgtgttcgagctggtcgatgcctttggtgacgcgatgggtgtgcggctggacatggggaccgccccggcacgactcggtgacgtcgtcggctgcgcgaccctcaccgggaaggcagagcgacttctggggtggaatgcggaattgagcatttccgacggcgtgaggcattcactggaatgggccgcccggctccccgcggtgctcgaacgcgagcgcgcccgggcggcggggcgggcctgacggcgtcggatcaccccgggtcaccgtcggatcagtcgagctgctcgtaatcgctgtggctggggaactcgagccattccacggcggcctggccggcgggcaccggcgtcacggccacgtgggtgagcgtggaatcctgcgcggcaccgtgccagtgctgcacaccggcggggcactcgaccacgtctccggcgtgcagctcgcgggcgggctttccctgctgttgctcccagccgtggccggccgtcaccagcagcaattggccggccggatgggtgtgccagcggttgtagcacccggcggcgaaggtcacattgccggctgacaggggattgtccggtccggtgagcatgtgcagccaggcatgtccggtgaagttggggccatcggcgggggagcccagcgggaacagtccggcatcgggggtgtcgtcgggcacgtcggcgtagatgtccttgagcagcccgaaggccgaccatgccttgggccagcccgcatagaaggccagttgggtgaacgtctccaccaattcctgcttggcgacgccgttggccttcgcgatgcgcaggtgcgcctccaactgggggaagagtccctgcgacatgaggctggcgcaggtgatgaggctgcgttggcgggccggcatctggccctcgcgcgaccacacctgcccgaacagcacgtcatcgttgagggcggcgaaggtgggtgccagttcgcccaggttgtcgcgtcctgctgtctgcttgtgtgccatggtgtggcccttcccgggttggatggtggctggccccgcgcccggaaccggggtgggtcgccgctgtccccacgatagtgagggtgccccacacgggaggggcgggccacatgcgacgaagccggggagcgccgatgtggcgtcccccggcttgcggtcaccggttctggtggtcgatcagttgttgcgggccgtcgtcttgcgcgtcaggtcgacgaagtcgggatcgaagccctccttggcatgcacggcctcccacaggcgtccccgcccggccacggagatcggcaggacgcgctcgggatcgctgaccgccgagagcagggtgtcgtcgtcctcggcggagcgacgcagcggacgcgggttgctggtgtcgagggcgcggctcatcacggctgccatcgggcccaccgacatgaggtcgagcgagagctcgtagtccatgtcgagctcgtcggccaggtcgagggcctcgcgcaggccggcctcggccgccatgatcgccacattggtgatcagcttgtaggccacgccgtttccggacttgccgacatagcggatgatgcccatcaccgacagcaccggatcgagcttggaggcaacctgctcgctgccgcccagcaggaaggtgaccgacttctcgcgggcgtagcgcacgccacccacgatcggggcgtcgacgacctccacgccggctggcgcggcctcgatcacccggttgagcatctgcggggtggtggtcgaggtgaccaccacgatggcgcccggcttcacgacggccagtgcgccctgttcgcccagcaacacatcggggatgtcatccgacatggtcagctggatcacgacgtcggcaccggtggcggcctcagccaccgaaccggccaccttggccccggcatccttcgccagctgcaggcgctcgggcagcttgtcgtaggcaacgatctcgaaatctgtttccaccaggtgtgggatcatttctgcgcccatgtcaccgacgccgattactgctactctcatcgctctcacagccttcgttggtaattggaatcgaaactgtcgatcaacagtgtgatctttgtattctgatttcgggttgaacaacggggcattttcacgtcaacgaaacagatgcctccgcttcgagactaacgtcccgcacagttcgattctatcgaatctgccagtggcgaacggcggtggcagcggttgcccgggtgcaaatccggcggtgccggaggaaaacgtccctcggcgtggccggttgccctcgcggaggggccgtgggcaaccggcgccggtgtggagcgtgggcgccccgggggcccggagcgaagctcgccccggatgcctggggcgaagctcgccccggatacctagagcgccagctcgccccggataaacgcctccaccgagtcgagggcggcctcgtcgtggcgctgttcgggcggcgacttcatgaagaagctcgacggtgacagcagcgggccaccgatgccccgatcgagtccgatcttcgcggcgcggatggcatcgatcaccacgccggcggaattgggggagtcccacacctcgagcttgtattcgaggctcaccggggcgcccccgaagttgcgtccctcaaggcgcacgaaggcccacttgcgatcatcgagccagtcgacgtagtccgaggggcccacgtggatgtcgcgctcctcgaagtggtgctccacattgctggtcaccgcctgcgtcttggagatcttcttcgacatcagccgctcgcgctcgagcatgttcttgaagtccatgttgccgcccacgttgagctgataggtgcggtcgatctggatgccgcgctcctcgaacagccttgccatcacgcgatgggtgatggttgcgccgatctggctcttgacgtcgtcgcccacgatcggcaggcccgcgtccacgaacttctgggcccattgcgggtcggacgcgatgaacaccggtaggcagttgacgaaggcgcacccggcgtccagggcacattgcgcgtagtacttgtcggcttcctccgagccgaccggcagatagctcaccagcacgtcggcgtgcacgtccttgagtgtgcgcaccacgtccaccggttcctcggcggactcctcgatggtctcgcggtagtacttgcccagcccgtccagcgtcacgccgcggctcaccgtcacgccggtgggtgccacgtcgctgatcttgatggtgcagttgtcggacgcgtcgatggcgtcggccaggtcgaggcccaccttggcggcatcgacgtcgaaggccgccacgaattcgatgtcgctgacgtggtagctgccgaactgcacgtgcatcagacccggcaccgtctcgtcggcccgtgcgtcgtggtagaaggtgacgccctggatgagcgacgacgcacagttgccgattccgacaactgcaacccgaattgaactcatgtgttcccctttgatctaatgaccacctgtcaggacattcatcgtccccggcggaatgtggtggccggcaattgtcctgatgattggacgattatcgtgcgcaaccatgcgcccggccgctgattggttatcaggaagacacactaggggaatggtgtgtcgcggggaagtgatatcccgggcggggctggcggaaagtatcgggaaaagctgatcaacgcgtgttaatcggcatcgggagcggcgggcagggtacggaggccggttcggccccaatcgatgaaatgtcacactttggtgacaaatactcgcgagccattgacagtggtgctatggaatggccgtcaccaaggccacctcccgggggtggtcagtccttgcgctgctgggggttgaaccggtagcccacgttgcgcacggtgccgatatacgagtcgtattcgggtccgagcttggcgcgcaggcgtcggatgtgcacgtccacggtgcgggtgccgccgtagtagtcgtagccccacactttcttgagcaggtcctcgcgggtgagcacgcggccggggtggtgcaccaggtacttgagcagttcgaactcggtgtaggtgaggtcgagggggcgtccgttcaccgacgccgcataggcggcctcgtccaccacgatggagccgccggtgatggtggcatgtccctgcgcggtgagcatcaactgcaggcgggcctcccactcggccggctcggcgtcctccacgatgaaatcggtgacgccccactcggccgtgagcactgacaggccctgcaacgggatgagcaacaaggtgggcttggcagcccccgagttgacgatgaggcgggtggtcacccgggtggcacccaggtctccgcgcccgtcgatgatcaccgcatcggtgtcggggatctgcaggatcgccttgtcgccaccctgcacctggtcgatggtgtggggcaacagcgtcagggcgccgggcaggggtttggggtcggtcgtgggcgagacgaacaatgcatcgctcatggacaacgccctcccgaaatcggcccatccggtccgttcttgaacaatagttggcacccgggtggcccgatcaggcgtttcatcgacgttatcgggccgattgcccgctcacccatggtgttgaatggtgcgccggtcgtcacggatgggtgcacccaactagctcagtgctcggaatcgagaatgatcgtgaccgggccgtcattgaccagctccacctgcatgtcggccccgaaatgaccggtttccacgtgggcgccgagcttgcgcagcgcggccacataggcatccacgatgggctcactcaccggcccgggtgctgccgcgccccagctgggacgacgccccttgtgcgtgtcggcgtacagcgtgaactggctgatcgccaggatcggcgcgttgacgtcgctggctgacttctcatcgtccaggatgcgcaggttccaggtcttggcggccaatttgtcggcggtggcggcgtcgtcgccgtgcgtgacgcccaccagcgccaccagcccgggtgcgggaagttggccgacaacctgcccatcaatcgacacctgcgcgcggctcgccctttgcaacacgactctcatgcctgaatgctgccacaggcactctcatgcctgaatggtgccacggccaccgggccctgggatcggcgagggccgctcgttgtgacgctcccctagaattgggtgcgtggcaacccttgacctgatcctgctcatcgtggcaaccgtcgcgatcctggcaggggcggttgccatgctgatcgtggccctgcgatggctgcgtggcaccgaaccccgtggacgccggcgccggcccacgcggcatctgatcaggaaaacaggcgtctgatgaggagtagctgaccatgcccttcgagatccccacagatctgaatcctgcgctcatgccgttggcctggctgatcggacgctggcagggcaatggccacggcacctggcccgacagcggcgacttcgaattcggccagcagatcgagttctccaccaacggacagccctatctgcactacttcagccagacctacgtggccgacaagaacggcaaccccgtgtcgccgatcagcatggagaccggcttctggcgtcccatcaacgacaagagcgtcgacgtggtgatgtgccatccgaacgggtggagcgaggtgtggaccggcaagatcgacggcgccaagatcgagctcgtcaccgatgtggtggcgcgcacgaagaactccgagctcgaatacaccggtggggagcgcctctacggcaatgtggagggcgacctgttgtggaccttcgatcgggcggccaaggacgtgccgctgcagccgtacatgtggggtcgcctggcgaggaagagcctgtgagcggccgtggccgctcgggtggaggacaactcgtgagcggccgtggccgctcgggtggaggacaactcgtgagcggccgtggccgctcgggtggaggacaactcgtgagcggccgtggccgctcgggtgggagcgaatcatgagcggcgtggtgctggttcccgagggtcccgacgccggactgctgtggcaccgcggcgatcccttcgccgaggaacgcgccattgccgccggtcaggcgatcgtggcgctgaccaatcgtcaggtgctcactgtcaccggcgacgaccggctgggttggctccattccctgagcacgggccgtttcgacgggctgccccccggtcagggcctcaatgcgctgatcctgtcgcccaccggccaggtgcgctacgggctgcaggccgtcgacgacggagagcggctgtgggtgatcaccgatccggcgtccagcgcgtcgccggacgatccggccgaaccggccccggcaaccggcgtccccacgggcccggacatgcagggcgtgggactggccgagttcctggactcgatgcgcttccgcttgaaggtgcaggtgtcgccacgtgacgacgcccgcgtgttgtgggtgggggaggggatcgatcccgccgacctgccggcggcgctggccccggccgtggacgccccgctgggccatggccagctcgtgatcgttgccgccgacgatgttccctcgcccgataatccgcgcctggcaggcgtgtgggcctgggaggctgcccgggtcgcggccggcgtgccgcgcatcggcatcgacaccgacgacaagaccctgcccaacgagctgggcctgtatgccaccgagctcgacaagggctgctacaccggccaggagacggtggcccgcgtgcacaacgtgggacgtccgccacgccgcctcgtgcgcctgctgctcgacggctcgatgaaccggcttcccgcgccgggcgatccgatcctgttggacggcgaaccggtgggcgtggtcggcagttcggcccagcacttcgaggagggcccgatcgcgctcggcctggtgcgtcgcgcggtgccggtggaggccaccctgagcgtggatgacatcgccgccaaccaggagccgatcgtcgatcccgacatcggcctgcacgtcaagcccgagcccggtctgcggcgacgcctcatctgaggcccggagggcggcccggaagccaccccgaaagccacagaggcccccgtcatcgaacgatgacgggggcctctgtcgtggttgatcgatcagacgttggcgtcagccgacttctccttggtgcgcaccttggcacggtcgcgggcgtccagcaccaccttgcgcacgcgcacgacgtcgggcgtcacctcgaggcactcgtcgccggcgcagtactccagcgaatgctcgaggctcatccggcgcggcgggatgaggcgctccagctcgtcgccggtggcggagcgcacattggtcaggtgcttctccttggtgggattcacgtccatgtcgtcggggcgggcgttctcgccgaccaccatgccctcgtacacctcgtcgccgggtccgatgaacagctggccgcgctcctgcaggttgaacagcgcatagctggacaccacgccggtgcggtcggccaccagcgagccggtgggacgctggcgcatggagccggcccagggggcgtagccctcgaagacgtggttcgagatcccggtgccgtgggtggcggtgaggaactcggtgtggaaggcgatcagaccgcgtgagggcagcacatattccatgcgcacccagccggagccgtggttcaccatctcctgcatcgtgcccttgcgcacgcccatcatctcggtgacgacgccgaggaattcctcgggcacatcgatcgtgaggcgctccgtgggctccatcaggcgaccgttctcgtcgtggtgcgtcaccacggcaggacgcccgaccgtgagctcgaagccctcgcggcgcatcatctccaccagcacggccatctgcagctcgccgcgtccctgcacctcccaggtatcgggacgttcggtgttgagcaccttgatcgacacattgccgatgagctcctggtcgagacggcccttcaccaggcgagcggtgagcagcttgcccgacttgccggccaacggcgaggtgttgatgccgatggtcattgacagcgagggctcgtccacgtggatcagcggcagaggcttggggtcgttgacatcggcgatcgtctcaccgatggtgatctcgggaatgccggcgatggcgatgatgtcgcccgggccggcactctcaacgctcacgcgttccagcgcatcggtgatgagcagctccgagagcttcacattctggatcgagccgtcgcggcggcaccaggccaccatctcgccgcgcttgatggttccctccatcacccgacacagggccaggcggccgaggtagggcgacgagtcgaggttggtcacgtgggcctgcaggggtgcgccctcgtggtactcgggggcggggatcgagctctcgatcacgtcgaacagcggctgcagatcggggctgtcgggaagctggccgtcggcgggcttggtcagcgacgccttgccggccttcgccgaagcgtagaggatcgggaagtccaggccattgccgtcggcgtcatcgagcaggtccatgaacagctcgtaggtctcgttgatcacctcgtcgatgcgtgcatcaggacggtcaaccttgttgatcaccaccacgatcggcagcttcttggccattgccttgcgcagcacgaaacgcgtctggggcagcgggccctcggacgcgtccacgagcagcagcacgccatcgaccatttccagggcgcgctccacctcgccaccgaagtcggcgtggccgggggtgtccatgatgttcagggtgagcgtgcgcccgtcggtcatggtgtgcttgacggccgtgttcttggccaggatggtgatgcccttctcgcgctccaggtccatcgagtccattacccgggtctcgacgtcgctgcccgctcggaaggcgccggactgccacagcatggcgtccacgagggtggttttgccatggtcgacgtgggcgacgatggcgagattgcgcagatccttgcggcgcttgacggtcataaaactccgaactgaatggcttggtggctggggcgcttgtgcggggcccagggacgattctgtgcgtgacgacggctcgctgaggcaaaccgcaacctgacaattctatgcgatgcgcgcggtgacctgtgatccgctcgcgcgcgtgaacgcccgcgggcacgcgcggcccggatgcaggcgccgtgccccggacccggcgagacggcgcgacgcggggtgtcgccgccgctgtggggatggcatccgggggttcgcatgagctcatctccaatgggtgatgtcggcgccgggagccggtaatgggtcgagtttcaacgcaccgaggcgtgaatgtttgtaacatgaatacgcaaaccttatcagctgaaatcatgtggtgattgtggtcagattcagggcgcttgggcatggtcatcttccgtgggtgcctccggtggattcctgcggggttttcctgacgtggatggccagcgctcgggagcgccatggccatgccgggactccctcgtgcgcgatgttgtgtccggcccctgccctggaggcgggcggtagcgtccggcgcgcccggtgttcaggcggcgggcaccccagtgcgcggggagtggccgcgacgggcctctgggaagctcaaacgagggcggaaatgcactcagtgcaccctttttcgatcgtttccgctgttgcgagaaaactgcactcagtgcaaagtgatgggctcgtggacggtggggtccgggcgcagatcgccggtgtggtgcgtgatggcggcgttcgcctctcggggcgcatgctgccgtgaaatggctcttcccagatgagggtgtagcgcacgtcgcgcggcgggccggcgcgtcggtggccggatagaggtcgaggtctcccgaggatgagagctcctacacactcagcccgaaagacctcgacgcgcacgacgctaccgtcggcgggcgcgctgatgcgttcgccagccccgacctgactgccttctgccgcctcgacgaactcggcctcgttgtcaccgggcagcgactcgagccggatcgtgccgtattggcctgccaggtggtcgagcccgaccagtggtgccggcgctgcggctgcgaagggagaccacgtgacaccgtggtccgacggcttgcccacgaaccactgggctggcggcccacgacgctggaggtcgtcgtgcgccgttaccgctgcagcggctgcgggtatgtgtggcgccaggacaccaccgccgcggccgagccccgggccaagttgtctcggcgcgctctgcggtgggcgctggaagggatcgtggtccagcacctgaccgtggctcggggtggcctgggacaccgcccacgacgccgttctggccgagggcaagcgggtgctgatcgacgaggagcaccgcttcgagggggtgaaggtcgtcggggtcgatgagcacgtgtggaggcacacccgtcgcggcgacaggtacgtcaccgtgatcatcgacctcaccccagtgcgagatggcaccggcccggcacggctgctggacatggtcgaaggacgctccaagcaggcgttcaagacctggctggccgaccgcccgcaggagtggcgcgacggcgtggaggtggtcgcgatggacggcttcaccgggttcaagaccgccgccgtcgaggaactgcccgacgtggtgaccgtgctagatcccttccacgtcacgcgcctcgctggcgaggcgctcgatgagtgccgacggcgagttcagcaggccatctgtgggcaccgcggccgcaagggcgacccgctctatgccgcccgccggaccctgtccaccggcgccgacctgctcaacgacaagcagaaggaccgactggacaccctgttcgccgacgacgcccacgtcgaggtcgaggtcacctggagcgtctaccagcgcatgatcgccgcctaccgccacgagaaccggcgccacggccgcgagctgatggcccggctcatcgactcgatcagcaccggcgtccccaaggccctggtcgagatcaccaagctcggcaggacgctgaagaagcgcgccgccgacgtcctggcctacttcgaccggcccagcacctccaacgggcccaccgaggcgatcaacggcaggctcgagcacctgcgcggctcggcgcgggggttccgcaacctgaccaactacatcgccagatccctgctcgagaccggcgggttcagaccccgactacaccctggattcggatgagcccgtgaaatggaattccggcgaggggtgaatctggttatccgttgcattcgatatcgcgtggtgcaggattcccgatggcgtgatgtggcgttctcggcggctgccggggcgggggcttccatgagggatcgatggcgcggaacgggtgattcccttaatcggggggcggtgatcctggggctgattccggtttgtagagtcaacgacgaaccttgcaccgaccgaaggatcgatgatggctcaccatcgcagatcggacgccacccccggcgtcgccccgcgggctcgcctgcgtgacgggggccccggcggctcgcggcgtcgtcgtggtcgcatggcggtccgggtggccggattggtctcggcggtgctgttcgccggtgtggcggtggacggtggtaccgcgcaggcagcgcccgcgtcaacgtcggcaccggcatcagccgcaccagtgacgcctgcgccgaccgatggcctacccaccgcggcgcccggtgcgacacctgctcgggaggcctcggaggctggccgggtgccgggaccggcggccaccgacgtgcccactgcgtcgccggctcccgccgccgaaacgcgcgcggccggcgccttcgactgcacccccgggtacgtgtatacggcggcggaggacggcaccatcaagcaggtcagttcaaccaacgccgtcaccaccccggtgactgctcccgggtcaggagccggagattcgcggacatggacgtcggacacccgcaagtggggcaccggcctcctgacgaagacctggggcatgggtcccttcggcattggcgccggtggaacgaaggcctactccttggaacgtggcaacgccgcgactgcggacaccaactacgggattccgtccctgcagggcctgaacgtcacgcggtcgttcaactacgaccaagaagttctcctggccaacaagtggtcggcgcaatggttcgcgaccagggacacgaagggcaatcgggctcatcccaatcgggggtgtaggagttggggtctgaagccgccggtctcgagcaggcttcgggcgatgtagttggtcaggttgcggaacccccgcgccgagccgcgcaggtgctcgagcctgccgttgatcgcctcggtcggcccgttgctggtgccgggtcgttcgaagtaggcgagcacgtcagcggctcgcttcttcagggtccggcccagggtggtgagctcggtgagcaccttggggacgccggcgctgaggtcggtgatcagcttctccatgagctcgcggccacgttgccggtcctcgtggcgataggcggcgatcatgcgctggtagacaccccaggtcgcctcgacctcgacgtgagcgtcatcaacgaacagcgcgcgtagcctgtcgctctgcttgtcggtgagcaggtccgcgccggtgtgcagcgtgcgccgcgacttgtagagcgggtcgtccctgaacccacggtgcccgtggatcgcgagttggacccggcgccggcacctgtcgagggcgtcaccggccaggcgcacgacgtggaagggatccatcaccgtgaccgcgtccgggatctcctctgcagcggcggtcttgaacccggtgaagccgtccatcgcgaccacctcgaccgcgtcacggaaggcgtcgtcgcggtcggcgagccaggtcttgaacgccgccttcgaccggccctcgaccatgtccagcagccttgctgggccggcgccatcgcggaccggggtgaggtcgatgatcacggtgacgtacttgtcgccacgcctggtgtggcgccagacgtgctcatcgacgccaatgaccttcacgccctcaaaccgcgtggggtcgttgatcagcagccgcttgccttcagccaggaccgcgttgttggcggtgtcccacgcgaccccgagtccctcggcgacacgggcgacggtgaggtgtgcgaccacgatcccttccagcgcccaccgcagcccggtgcgcgagagcttcgcgcgtggctccgccgcggcgctggtgtcttggcgccacacgtgtccgcagtcggcacagcggtagcggcgcactacaacttccagcacggtcggtcgccagcccagcggctcgtgggccaaccgccggatcacggtgtcacgagcagcgccttcgctgccgcaccgtcggcaccactgatctggttccaccacgcggcacgcgaggaccgcacgatccggttcaagtcgttgtccggtcacgctcagaccgaggccgtcgagtcgagcgaaggcggtcaggtcagggcggccgaagccggccggcggggtagcgtcggacacgtcgaggtctttcggatggatggcgtaggaacctccatcgtcgggagacctcgacgtctatctgcggaccgacgcgcccggccgacctacaccctcatctgagaagacccggcaatcgtccgttggcggctggcgccgtcgtgccgactgggaaggacgctggccagctctacttcggctcgtttgaggccagcggcaccgtgggcggggccatgtccttcaggctgtcgagctacaagccgggcggcctcaacggtgcctggcgcaccatcggaacgatccccctgcccgacttcgcctccgacgcgaccaccggcaatccggagtccgactacttcgccggcagccgcggtctggagggcgacatcgccttcgatgccgccgggaacatgtacatcctggcgtccacccagcccaaggtgaacccgaacatgcccggtggacgctcgatcaaggtgcaactcatcacggtgccggccaactcactgatgccgatcgccgaccgcgccgtggagatcccggtgcccgcgggggcctccggtaccggcctcaccggcatggccaccagcgccgacggcacgctgttcgtcagcgacgccacctccgtctaccgctacgacccggtcagctggcaactgctcggcacggtggccacctccgtcggtggctccgccccgggctcgcgcctcagcgaccttgccagctgctcactgcctcccacgctcacggtcaccgagaacctgccgcagggacgcaacctgcccaccgaccagttcagcgtcgcggtgcacaagggcgacgccaccgccacgagcctcaccacctccggcaccgccaccggcgtgcagccgcagaccgccggtccactcatggtgctcagcacccaggccgtcaccctcacccagaccatgcccagcggcgatccgattggctacctcaccacctggcagtgcaccggcacgacgagcgacaccagcagcggcacggggccggtcgccaccgtgtacgtgctggcgggcacggccgcgtcctgccagttcaccaacgtgcccaacctcggcaagctcaccacgaccaaggacttcccgcagccgcactacggggcacccaccgatcccaccgcctggacactccgggccatcagcaggcaagccttcatggccaatccgaacgccgcctggaccgacttcacctccgggcagacccgttccctgggtgcccagacctacctgctcgacgaggcgccccagcccggatatgagctcacgggcattacctgcacgcccctgggcggaacggcccagacgcttcgccgcgagccggtcgatccggcccgtccggagctgggcgaggcctaccagtggtccctggctgccggccagcaggttacctgccagctgcacaacagcgtgcagcccggcacgctcacctggaccaagaccagccagtcctctgacctgctcgccggctccgggtggcagctgaccgcacccgggggagcgcaactggcggtcgtcgacaacaccggccagccgggctacgccggcgccgacaccgacccgactccgggacgcttcgtggtgaccaaccaaccatggggcagccatcgactcgtcgagaccgaggccccctcgggccatgcactcgcccagggatccaccgagctgaccgtcaccgccacccacctggcgccctcagtcgccatcgccaacgacccgctggtcttccacctgcagaaatccggctatgcccatccgggggcagccgagccgacgcccatggatggcgccgactacgagatccgcctcgatgacggcggtcgtcccggtggcttggtgcccggcgtcgtcgtgaaccccaccgcaggcgtgggacgcttcgacgtcaccggcctgcccaccgggaacttctggctggtggagaccaggtcgctgcccggccatgccctgctgcccgccgctgtgccgttcaccgtggtctccggcaccaccgccctgccgctgggcaggatcgacaccccccggcaggagctcacctgggcatccgccgacggattcaccctccatgtgcgcgacgagcgtgccgtccagctgccctgggcgggcggcagcacctcgccactgacctatgtacttgccggcctggcgatcatcgccaccgcgtcggctgccggggcaatgcgctcccggctgtcccaccccgccgcagcgagtcccggtgacccgctgtccgacaaggaaatgagatgagaatgacaacgacactgacgagaagaacgcggtggtggcgcagattcggtgccggcgtcgtggcgatggtcatggcatccctggcgatgttcggcgccagccgggcctctgcggccgacgtgggtaatccggccacgatcgacccgggcgccaccggaaccctgaacgtcaacaagcgggtgaatcccaccggcacgccgacgccgggcaacggcctggagcaggccaatgtgaccagcgacccgctgggtggtatcgagttcgtggtcaagcagatccccggcatcgacctgaccacccaggcgggatgggacgcgttggcggcgatgaccgtcgaccaggcgcgaaccgccacgcagaacgtggccggcagctcccagacgaccaacgccgctggcctggccagcttcaccggcctgccgctgggtggctacctggtgcaggagaagctcacccccgagcagctggcgagcggcctcaccccctcacccgacttcgtggtgaccctgccgctcacccatcccacggacctcaatgcgtggctgtacacggtgcacgtctacccgaagaacgccaagtcgtcgatcaccaagaccgtcgacgacgccgcggccaaggtgctcggtgacccggtgaactggacgatcctgggcgacatccccagcaccggcgcgaccgacaggtatgtgatcaccgacgcattcgactctcgtctggactacgtctcggccaccgtcaagctgagcaaggggcaggttgcgctggcgcctgaggactatgtgatcacgccggcccagggcaccacggcactggcggtcaccttcaccccggcgggcctcgcgaagctgtggcaggccaagagcgcagacaactcggtgcaggtgcaggtcgacgtctccaccaaggtggcgggtgacatcggtgacggcatcatcctcaacgacgccaggctgtttccctcgatgtcggttgatccgggcgatccccagagcggtgtctcggtggccgatcccccggtgaccaagtggggcaacatcgagatcaccaagaaggacgccggcaccaccatgctggcaggcgcccagttccgcgtgtatcccacgccgccgacgccaaggccggcaccaactggctgaccatcgacggcgtcgactcctggaccaccgatgaccagggcaaggccatcatcgcctcactgcgctattcggacttcgccaacaacgcccaggtggcatccggtgaaccgggctacaacgagtactggctgggtgagatcaaggcgcccgacggctacgagctgcaggccgagcccgtgcaggtggtggtggaccagctgacgaaccaggtctccgtcaccaatgtgaagcacaacgtcggcttccagctgccgatgaccggtggcaccggaaccctggtgttcatcatcgtgggcctggcgatcatcggcgtggccaccgtggtgctggtgcgctcgcatcgacgcagcaggcaactggcctgatcgtcgttgtcggccggctccccgtgggctgaaccgctggctcatacgacgccgggatggggtttcgcggctcttcacgaacgagggtgtagcgcgggtctgaatccgccggcttcgagcagcgaccgagcgatgtagtggctgaggttgcggaagccgagggctgtgccgcggaggtgttcgagtcggccgttgatcgcttcggtggggccgttgctggtgccggggcggtcgaagtagccgagcacgtccgaagcgcgctgtgtgagggtgcgggcgagtttgcggatctcgacgagctgctccgggacgctggcgctgatcttgtcgattgtgtgcgcgaggaagaatctgcccaggccgcggtccttgtcccggtaggcggtgatcatgtcttggtagatgccccacgtcgcttcgacctcgacgtgcctgtcgtcggcgaacagggcatctagccgcgcctgctgcttgtcggtgagcagaccggcaccggtgagcagggtccgtctggcctggtagagcggatcgcccttcatgccccgccggccgaagacgtcgtgctgtacccggcgtcggcagttctccagcgcgtcaccggcgagccggatcacgtggaacggatccatgaccggggccgcgtcgggcagttcttcggcggcggcggtcttgaacccggtgaatccgtccatggcgacgacctcgatcccctctcgccagggcttcggtctggcggcgagccaggtcttgaacacggctttcgagcgtccggcgaccatgtccagcagccgtgccgggccggtcttgtcgcgcaccggggtcaggtcgatgatcacggtcacgtacgtgtcgccgtggcgggtgtgtcgccacacgtgctcgtcgacgccgatcgtggtcacgccctcgaaccgcgccgggtcatcgatcagccgccggcggccctcggcgaggatcgcgtcgttcgcggcggaccaggacacccccagccctgccgcgacacgcgtgaccgagagatgatcgaggaccaagcccgccagcccccacgccaacccaccgcgggagatcttcgcccgtaccggcgcggcggccgtggtgtcctgccgccagacccgcccacacccgcagcatttgtagcgccggacccggatcagcagggtcgtgggccgatgcccgaacggctcatgcgcgagccgacggatcaccgtgtcgcgcggggcgccctcgcatccacactcgcggcaccaccggtccggctccacgacacggcactcgatcaccgcccgatccgggtccagacgctgcccgacagcctccaggccgagctcgtcgagaccgcagaacgtggtcaggcaaggtgtagtgaaagtagggtgtgacacgtcgaggtcttccggcagatggcgagtgtgagaacttccatcctcagggagacctcgacccctacccggccaccgacacgctcaacccgctacaccctcgttcgtgaagagccggtttcgctccccgttccggcgtcgtgtcatgtgcggaacggggacgactggcttctgccgtgagcgaacaggctctgcgtgtggcattctctcggacttccacgtgatggtggctccggtgcttttcggcccacgagtcgggtgtgatgtcgaggggtggcgaccctgccaatggtgctggcgcacagaatacattcctcggcccatggcgcctggcagcgcagggcaatttctcatcgcgcctgacggggatggccgcgaagaagtaatgccggcacaccgatacgtccgcatgcgtgtcgaccattttcgcgggtgcagatccagagtgatgtgcgcaaacatgtggaggtccgggcctgacccacgtcccctcgtccggcctgcaccattgcacaatgcatgcgtgcataatgcaatagggtcccgaattgtccgtacatggcaggcgattggcggtgccgtgccgcggggcatccgagaaatatggctggctgcgtcccggtggaggctccggcaccggtgtatgcgcccgccggcgccctgtcctgacggcgggtgaggccggattgtgcgggtccggtgtgcggctcggatgattgatttacaggggtcggtaatccacggtgtcccggcggcgggacggctttctgtgtcgcggccaatgatccccgggggcggatcgatgtcgacagcgatcggcccatgatggttgatggcaggcaatgcgttatcgcatggtgagtgatttgccgaaggtgctgcgaatatcgcgtgtcacgaaagtatctgacggtgcacaatccccgcgggatgccgcccgtggcacccggttgatgtgccgatcgccattgccaagtgccgctccgcttcttattgtttgtagtgaacctgtggtccccacagttctgtgaacccccgcgcagaaggagccatggaatggccgaggacaaccattcgaatgcacgacgcaatggcatccgacccaccgtcgcggagcgctcctcctggcgcaccgcacaaggcccgttggccagcgtcgtgccgatcggcgtgggtggttggcctcgtcccatccgggggaactcgcacgagctgggcgtcgcagcgaacagttcggtgcccgcgagcacatccggctcgcagtctgcgccggatgccacaggtccagtcgtcattccggccacgaggcgagtgccgggcgacgacgcgggcggcatggccacgacaaccccctgctgaggccatgaccggtgatggcgccgggatggaggggtcctttcgctccatcccggcgtttccgcgcagggaacggggcggtgccctcagcgccacgggcgtttgacatcatggaaaccagcttcatcgatgaccgcatcgtcgagtccggtttccccaggcgccgggcaggcccggccccgaaacggagacccccacgatgaacgccgctcgccaggcccgtcggcccaccacccgccctgcgggctgggatcgcgtgctgatcgccggcctggtgctgctgggcgtgctcgtgatgtgctatccctcggcggcctcatggttctcggcgcgcgccgagcgcgacgccatgcactcctatgccgaggccgtcggccgcatgagccccgaacagcgcgctgccctgctgaaatctgccgaggactacaacgcgtcgctgcccggtgggttgatcatcgacccgttcaccaacacggctggcgtcgagccgatggtgctcgacgagcccgccaggctctacctggcccagctcaacgccgaagccgacggcgtgatgtcaactctcacgattccccgcatcaaccagagcctgccgatctaccacggtgccaccgaggcggcgctgcgcaagggcgtcggccacctgtacggctcgtcgctgccggtgggcggtaccgacacccatgcggtgctcaccgcccacgccggcctggcggaggccgagctgttcacccacctggacaggctgcagcccggcgacctgttctcgttgaccaccatcggacgccaactgcactaccggatcatcggcagtgaggtggtggaaccctcccaggtggccacgctgcgtcccgcgcccgggcacgacctggtgacgctggtcacctgcacgcccatcggcgtcaacagccatcgcctgctggtgcacgccgagcgcgtcgacatcattgaccagaccggtcccggctcgccgggcgtcgggttgggattcccgtggtgggtcatcccggtggggctggccgccgtggcgttcgtgtacacattgggccgcacgatcgtgcgacgtcgctattcggccagcccgtacaggcggtcaccggcatcgcccaggccgggaatgatgtagccgtgctcgttgaggtggtcgtcgacggcagccaccacgagggtgcagtcgatgccgcggtcctcggtgagttcgcgcacccgcttgatgccctcgggggccgccaggatgcagatgcaggtgatgtcgtctgcgccgcgatcggccaggaagctcacgcagccggccagtgatccgccggttgccagcatcggatccagcacgaagcactggcgtcccgacaagtcgtggggcagtcgctcggcataggtggtgggctgcagcgtggtctcgtcgcgggccatgccgacgaagcccacctcggcggtggggaccagccgcgtcatgccctcgagcatgcccaggccggcgcgcaggatcggcaccacgagcggcttcggcttggccagggcactgcccttggcccgtgccaccggggtgtccacctcaacatcggtgaggagcacatcacgggtggcctcataggcgagcagcgtcaccagttcggcaacgagcagccggaaggtgggactcggtgtgctcgcctcgcgcaggtgcgtgagcttatgggccaccagaggatgattcacgacgcgcaattccacaaccgccagcctcccacatccgccggatcgtgcgcgcgccgacgacgcacgcggatggcgctggcccccacgccggccgttcgtcgcaccgtgacgcggccacccattggacgctgtacaacccggggggtgcgcgctttggtccggcatgggatattggggtccatcgcgaggtaaagggggctgccgtgaccggggacaagaagaatgacaaggacatcgacgtgaccgatgtcgaccatgccgatgttgacgacaccagtgccgatcgtgcgggcaccgccgatgacctggacagcctcgacgacgacgacaacgagctggacgccagcgtcgtgaccgacgactacgacgacgatctcgacgacgacagcgatgatgacgacgacgatgacgacagcgacgatgatgatgacgacgatgatgactatgacgacgccacctcggacgagatcgacttcgtcgtagccctctaccgcgagggcggggaaccgaccgtcaccgagctgcccgatatctgcgccaacgacctcgacgaactggtcgcccagctgcgccggatgcccggagacgtgggcgccgtcggtgccgtgagcatcaatggcgagttcttcgtgctgtgccgggtgcgcggcaaccagatccaggtgctgctgaatgacgccgtggcctccaacgactggccgatcgcccgtgacgtgatcgacttcctcgggctggaggtgcccgatcccgacgacgattccgagccggttggcgatctggacatccttgccgaccagggcgtcagcgatttcgagatggagtccatcgccgaggacttcgacgaggattccggcgagctggtcggacgcgtggtggaggacatgaagttcaccgagccgttcgacaaggccctcggcgacgatggcccctgagcgggtgacgctgcgcgcccggggtggccgacgccgatgaggcgacgtcggtgagcaggtgggacgccgacatgtcgcgtgccctggcgctcgcccgtggggcgggcgcagcgggcgatgtgccggtgggtgccgtggtgctcgatgggaacggtgtgctgcttggcgagggtgggaaccgtcgcgagcaggacggcgacgccaccgcacatgccgaggtgctggccatccgtgccgcgtgtgcgcgtcgtggcgcgtggcgcctggacgactgcaccctggtggtcaccctcgagccctgcacgatgtgtgccggtgcgctggtgaatgcccgcatcaggcgcttggtcttcggcgccttcgaccccaaggcgggcgcgattgcctcgctgtgggatgtggtgcgcgacccgcgcctcaaccaccgtgtcgaggtcgtcggcggcatcatggccgacgactgccagcgcgtgctgactgatttcttcgcgacgcgtcgctgagcgcggggatcggcgctgagtggcgcagggggcgattgcacttgtaagctgttccgcggtgacgtgtctgagcggccgaaagagctcgcctcgaaagcgagtgtggtgcaagccaccgagggttcaaatccctccgtcaccgccacagggaacccccgggagcatcatgccgggggtttctgctctttccgggacccggctgttcggcaggatgggcacgttcccggccttgtgggaggcctgtgcgggcctcatagcgcatcagtgaggtcactggtcggcgtgtctgcgcgtttcagagccgccgcgggcgtaggtcgcaatccggtagtctggtcgggcgttgagccggcggcacacaatactgcctgcccgctggcgaggcgcacgggccgtccacccaccatgatggcgtgtcccatgcgtttcccctcgggggcgcaatcggttgatgagtcgtcggaaggagggcagatgttcggcaggaagtccaggaagaaggctgcagcgcaggcgacccctgacgctgaggtgcgcgccgacgacgccgtttccccggcggtcagcgaggggggcgccgatcagcccgccaagggccccggcaacgctgccgggaatcccgaccacatcgccgcgggcgatcctgaccacagtgctgcgggctccatgccggatgctgacgtatccccggccaccgactccgcagctgcgaccagtgacatccccgacggtaaccacggtgatgacgccacccgggaagcgacggcgggggacgacggctcccgggccgccattgcccaggcaatctccgaggacgccaaccactcccagcccgaccagaacgatgccgcatcgaccctgacgcagatggccgcgatcgacgaccagtcgtcgcaggccggcgcacctgaacttgagggccccgggcccgaggccgagctggacgccgccccgcaggagcccgagctcgatgagccgtcggacgacgccccgagcggcgacgccgaaccggacggagcccagctcgaaggcgccctgcccgaggacaaccagcccggcagcacacccgagctggccgaaccggccacgcaggctgagctgcccgcgcccactggggagcccgcgctcgacgctccctcgccggaacccgaacttgccgcggccgaccaggaatccgaactcgagccgcaggacgatgagcccgaacttgagcaggtccccgccgccgactccatgacatcgcaggcccagtccccggatgctgcggatacggatggcgaggccgccgggagcgagccgacgcccgacgatgccgccgcggcggattccgcatccgacgatgggcccgccgcttccgacgaggccggcgcggacgtcccggaggcggaggagtccgcaacgcaaccagcaccggacgatgcgtccagccagcgacccgagcttgtggcgcccgtgctggcggctgccgccgacgccccggaagccgatgcctccagtgatgacttcgtggggctggaatcgaccacgcgcgtgcgtcgatcactgccgttggccatcttctccttcgtcgtcggcgtggtgctgatcggcatcgccttcctgtggtggcgcttcagcacctccctgcaggcatccctgtggctggtgcttgcgctggccgagctcgtggtgggattcgtcatgttgcgccacctgcgcttcgtggtgcgggtcagcgaggcagggatctcgaaccaggggcattcgccgtgggcactggacgccgaccagatcgtcgacgctggagtgcagcccggaaagcaccccacgttgtgggtgatgcccaccgacgccgcccccaagcagcccaatggctacgcctcggcggcactggtgcccaagggcgcgaagctggcgccgcttgacccggcaatggccgatgtcatcgaaagggcgctggaccagtggcgcttcgccgccccgcgccacgaagcggccccggccggtctcgaggcaacaccgcgcatcccatccgggcaggacgtcgcaccggcgtcggcacccgatgtccgccaggacgggacggcccccgccgcgacgcaggccgacgtgcaggaccagcccgcgccggacaagaccgtgggcgtactcgatcccgagacggccgcctggcttgctggcttcgatgaccccgacgagggcggcgagcactatgtgccgcgttacgcgcgtccgaaggcccggcacaccgagggtgtgccgatggccgattggcccaccgagccgatgcgggccctgacccctgaatacctggcccagatcaaggcccaactcgacgacaaatccaagtaattccggagggggcccatgtcagctttcgacctgacgctcttattgggctccgccgtggcattggtggccgtggcggccgcgcgcctcggctcccgtgccggcgtacccgcgctgctgctcttcctgttcgtgggcatcggcctgggctccagtgggctgggcattgacttcagcgacgccaccatggcgcacaacctcggcttcgccgccctggtgctgatcctggccgagggcggcctcaccaccaagtggtcgtcggtgaagcccgtgctgggcatggggctcatgctggccacggtcggatcgctggtcaccattgccgtggtgggcctgttcgggtacttcgtgctcggcctgccccgatccgtggctttcctgttcggcgccgtcgtggcgcccaccgatgccgctgcggtgttcgcggtattgcgcgcggtgcccctgccgcccaccgtgcgcgccgcgctcgaggcggagtccggcttcaacgacgcccccaccgtgttgctggtgatcgccggcaccaactatgcgatcggcgtgcagcccgccggcggtgtgatcgggctggccggcaccgtggtgctcgagttggcctccggcgtcctgctcggcatcgtgatgggctggctcggcgtgcagatcatgaagcgcctctccctgcccgcctcaggcctgtacccactggcgacgatggcctggatcgtgttcacctatgggctcggcgagctggcccacggctcggccttcgccgccgtgttcgtctgcgcgatgatcctcggcaacgcacaactgccacaccgccacgccacccgctccttcgcggagggcatcggctgggtggcccagatcggcctgttcgtgatgctcgggctgctcatcgagccgtccaggatcaccttgcacgatgtgctgatcgggctgctgctggtggcggtgatcagcctgttcgcgcgcccggccgcggtcttcgtctcggtggtctggttccacgtgccctggcgcgaacagaccttcctcagctgggccggcctgcgcggggccgtgccgatcatcctcgccaccgtgccgcttgcctcccagatgcccaaggccgacgagctgttcgacatcatcgtgatcttcgtgatcgtctcgacgctcgtccaggcgccctcgttgccgatcgtcgcccgctggctggggctggagaacccctatgccgccaccgacgtggacatcgaggtggcgccgttcgaggaacgccgcgccgacctgttgcaggtgaacatccccgccggttcgaagctggctggggtggccgtgcgcgaactgcggctgccgcccaatgcgatcgtggcgctcatcatccgcggtgacgaatccttctcacccgatggccacaccacgctgctcaagggcgacgaggtgctggtggtgacgccggccaatgttcgcgacaaggtggaacgccgcctcaccgacctggggcgtgggggacgcctggcgatgtggcatcgcggcggtcgtcgctggacgcgggcccaacggcgggcccatgcacaggcacgacggctgcaggcccaggccgacaagcgggccggcaccgcccagtagctgccccgtcgtcgcccggctggcagggtgggggtgcggccgggttggcagggtgtcgcgagggaacggcagggcgttgatcagttgccggtgctggccgcgccggcgggcaggcagatcacgccattggggatcggcacggtgcgctcggcgctctgcaacggcatggccgaggtgtcggagacgatcacgtcgacgcgatggtcggggcgtccgtcggcggtcacggtggccccggggaagaagcctgccacgagctgcacctcggggtcctcggtgctggtgccgacgatggtcaccggcacggtgacgcccggcgccggcgtggcctgcgatgacggcgagggactggcattcccggtggaggcgatcacgaagccctgggcgcgcatgatgccggcaacctcattggcccgtccacgcacggtgcccgcattgatcacgcgcagctgcacctggctggtgctcagctggctggcggactgggagacgcacggcggcacattcgcttccggatgcatgaacgcccgccatccccaccagccgcccagaaccacgatgcaggtgacaacggtcaggatcaacggggtgcgccatttgtgcaccgggtacctctttctgctcaggggtgggggactcaggcgcaccggggtgggtcgtgtcctactgtcgtcgatcatatggccgcgtcctgtccgaaccggggtatctaagagggttctcagcaccttctgtgcaccttcttaggtgcgccatgtccggggcctgtgaatggggcgtccgggcggctgcgcaggggtcgccgggcctggtccaccgatgcgcgatggtgacgcaaacccgggtcgtcaggaaaacgatgaccacctgatggaataaatggaccccccgctggtgtcaccccttccgctgtgttagcttaggcatgcctaagtaagctagatgtgaacagcttggttgcacggatcgggaataaaccccctcacgccggccaggtcgccacttgagccgggtgatggagcccggtactgaggagcttcgatatgtcagccagagtcgttcccgatgagttcaccgccgagaccacgcaagccgtcgcgtccttcgagaccgtgggttccaagatcgtgccgctgagcaatctgcatgccggcgacgtcggcgtgatctgtcgcctcgacgaagaggctgacgagtcgatcacccatcgcctccagctgctcggcttcgactgcggccgcgaggtctgcctgattcgccaggcgccgctcagcggtcccatggtgttccgcgtctgcgacgcccagatgtgcctgcgcgaggcccaggccgacatgatctacgtgcgcatccccgatgatgccgcccaggtcgttgccgacgccgaagccatcgtcgcctgattcaccccgcggcccattgcctccagcagtgggccgcctccttgagcggcccgaccccgagtcgatgggccgcaatcccacctcggacgaaaccgtccgaacgccagtcggcggtgccgtcctgcccggatccgcgccgtccgcatccgcctcaacccgtcattgggagcccattttcatgtcttcggtcgttgacgcctctcgtcactcaacaccaggtgccccggcaccgagtggcactgcgcagattgccctcatcggttcgccgaatggtggcaagacgtcagtgttcaaccggttgaccggccttcatgccaagaccggcaactatcccggcgtcaccgtctcgcgcacccgcggcgtgatgaaggtgcacgaccacacctacaacatcgaggacctgcccggctcgtactcgctgacgcccatctcgcccgacgagcaggtcgtctccgacatgctcaacggcaagctcgagggcgtgggggaacccgacgccctgctcgtggtggccgattccaccgcgctgcgtcggtcgctgttgctgctcagcgaggtactgccgcgccacaagccgacggccctggccgtcacgatgaccgatgaactgcgccgtcgcggtggcgtgctcgacatcgagggcctgtcgaaggcactgggcatcccggtggtcgccgtcgtggccaaccgtggcatcggcatccccgagctgcgcaagacgctcaccgaatggcaggactggtcgcgtccgccgatcgacccgccggccgatccggcagagctcgccgggtgggtggactcgatcctggccagcgccggctacgagggtcccaaccccgactcgcgcaccgagaagatcgacaaggtgctgctgcacccggtgtggggcaccatcatcttcttcgcggtgatgttcctgttcttccaggcgctgttcacctgggcggccccgctgcaggacgcgatcgacaccttcttcggctacctgggcgggttggtcgacgagcacatctccaatccggtgctcggcggcctgctcggtgacggcatcctgggcggcgtcggctcggtgctcaccttcgtgccccagatcctgctgatgtacctgatcctcgcgttgctcgacgcggtgggctatatgtcccgcgccgccttcctgatggacaaggtgatgagcaaagcaggccttgagggacgcgccttcgtggcggtgctctcgtcgttcgcctgcgccatccccggcgtgatggccacccgcaccatcccgtcgtcgaaggaccgcatcgccacaatgctcggcgtgccgctggccacctgctcggcccggctgcccgtctacctgctgctcgtcggcatgctcgtgcccagcgaggcgaagctcggaccggtcagctggcagggcatcacgatgttcctgctgtacctgctgggtggcgtggccgccatgaccgccgcctgggtggtcaagaagatcaccgaccgctccggcgccgtgctgccgttctacatggagatgccgccctaccgcgtgcccaccccgcgctccgtgggcatcgccatgtgggagcccaccaaggcgttcctgcgcaaggccggcaccatcatcatggctgccacgatcgtgatctgggccctgacgaccttcccgatgcgctctgacgagcagctgtcggcggccggcgtcgatccgggcgatgccgtggcggtcagcgcctacaccatggagaactcggtggccggccatgtgggccgcttcgtcgagcccgtcttcgagccgctcggcttcgactggcgcattgacgtggcgctgatgggctcgttggccgcccgcgaggttgccgtctcgtcgctgggccagatggcggcgtccagtgaccccgaggccaccgatgacgtggccagccagttggagggctggacctacacccagggtcccagcgagggccagaaggtcttcacccccgccaccaccgtggcactgatcctgttcttcgccttcgccctgcagtgcctgtcgacggtggcgatcatgaagcgggaatccgggggatggaagtggccctcgattgcgttcggatacatgttcgtcctggcgtgggtgatggccttcatcggccacacgatcacgctgttggtcacctagatgaaggttcgcacaatgttctcgcaccggcaccaccccgcttccagggtccccacgggccgtggacggggtggtcccgtgtctgtcggggtggctgcggggccatcctccggtcttgagcagctgatggcgcgcgcggggcagtcacccgccccacgccccgacgccggctcacatcaggcaggcccggccggcgggcggatggactgtccaccactgcgcgacccgagttcggccacgcctcccggggtcattgcgctgcaccccgaggccaccgacgatcccgccaccctgcggtgggtggtctcgcaccacatccttcccttcgccggcaccctggcctccgcgcccggactcgacgatctgctggccgatcgcgtgtcgcgcgtggtcgtgggccccgacaccctgttggtgaccctggccccggggagcgactgggccgaactgggaccggtggtgcgccgcgccctgatgcgggcgctggggcacaccgatgcctgggtgggcgccgcggatgcgcgcgtcctcagcggtgatgacgccctgggcgtgtgcgccgacgaactcatcgagggcccgatcggcgatatcgcccgcgcccacggtggtcacatcgccctggccggggtacaggacggcgtggtcaccgtgaagatgtcgggggcctgccgcgggtgccccgcagccgtgatcaccatgcaccagaggctggagcaccagctgcgtcgccgggtgcccggattggtcgacgtgcgatcgatcaacggctgagtcaactattctcggctggtccggacgccccggaagctgcggatggcccggagccatgtgagaaagtagagcccatgacgacccagcacagtcaccctgcccggtgtcccatcagctcgcgtcccatcggttcgcgtcccatcagctcgtgtcatatccgggggtgccgctgacgtggacgcccagggcatggcggagatcttcccgcagcacttcaatgcacgtcccaccggtgtctggtctgcgccgggtcgcttcaacctgatgggcgagcacaccgactacaaccgtggcttctgcctgcccgtgccgcttgacgcgcgcaccttcgtggcggcccgggcccgcgacgacgagcgcatccgcctggtctccctcaacatcgagggcgatgtggacgtggagctgtccgccgtggatgccgaacggcccgggggctggggcgcctatgcggccggcgtgctgtgggcattgcgccaggccgggcatccggtgcgtggcgtcgacatggtgatcggatccacgctgttgatcggggcgggactgtcgagctcggcggcgctcgagtgctcggtggccgccgctgcgtcggacctgttcggcctcggcctgctggccgatgatgccggacgcaagcaactcgccgtcgcctgccagaccgctgagaacgagatcgcgctggcacccaccggcggggtcgaccagacctcggcgctgcgcgggagcaggggacatgccctgctcatcgacttcctcaccgacgtgctgcgtccggtgccctatctgccgcaggacgccggcgttgaggtgtacatcattgacaccggcacgcgtcactccttgtcagcgggccattacggcaatcgccgtgccgaatgcgagcagatcgcccggatgctcggcgtggactacctgcgccgcatcgacgaggccggcctgcccgaggccatccgtcggctgaacgaccccacactggccaagcggctgcgccatgtggtcaccgagaacgcccgcggcgtgcgcatggccgacgacctggaggccggcgactggcgggccgttgcgcaggccatgaccaccgcccactactcgatgcgcgacgacctggaggtgagcgtgcccgaggtcgacctggccgtggacaccgcgctggccgccggcgcctggggcgcccgactggtgggtggcggcttcggcggctgcgtgctggccgtcatgccacggggcaggggcgatgagctgctgcacgccgtcagcgacgcctacgaccgtgccggatatgccaccccgcagggcttcgtcggcgaggccggcagccccgcagcgcgcgacctctagggacgggccctcccgcgggtgcgcccgggccgatgggcccggcggccgcccgtggggcctgacacgtggccaatcctgaccagcaggcaggccctttcagcaggcaagccctgaccagtaggccagcccgcgtggcagtcatgcccgggcaatcaacgccggcccatcaacttcggatcaacccagcgtgcttggggacgcagcgcccccagcacttcaattgcccgcagcgggcgaggtctgcgcctggggactggccgtcgtggtcacggtcgccgcaggctgggtctcggtgaccgtcgccgccggttgcgtcggctgggtggtcgccgagggggcataggtggtggccggagcataggtctggctgtacgtgggctcgctggtgttgctgtagctcgccgtggcgctcgggcttggcgtcgtggtcatggtgacggtggtgctcggggccggcgcggtgtcgcggccgcgctcggcgaaggcgaaccagaccgcaccgatgaggatcacgatgatgatcagcgccagcaggatcctgcggacgcgctggctgcgttggcgttgcttgttcgccgcggcggcatcggatgcatcggccggacgacgcaccaccggacgcgtcgaactcgtggagatggcgtcgtcggtgcttgcccccgccggggcacccgtggcgggagccgtggtgttcgtggcgtcgatcagcgtggtgcgttcgctcggggtggtcggcgccggagccgcaccggcaatcgccacggtgggcgcattgccattggtggccggcgtcacggggatcagcgaggtgacgaccttctgggcgtcggcggcgttgctgtcgatggcacgcagcgcctgctcggtctggcgcgcattgggacgcccggccgggtccttcgacaacagcgcggtcaccagcgtctcgagcgcctcgggggtgtcggcgcgcagctggcgcagtggcgtcggcgtgtcgtacacctgggcacgcgccaccgcgatgggtgactcgcccgggaagggcggacgtccggtgagcacggtggtgatgaggcagccgaacgaatacatgtcggaggcctggctcacccggttgccggaggcctgctcgggtgacatataggccgccgagccgatggcggtcatcgtgctggtcagcgaggtgccctgctggtcgttcagccgggcgatcccgaagtcgacgatcttgggcgtcgagtgcagcgacttggtggccagcaccacattggccggcttcacgtcgcggtgcgtcacgccgatcgcgtgggcagcacccaacccggcggccacctgcgccagcagcggcacggccacggcataggggatgggcccctcctggttgaccacggtctgcaggttgggcccgtgcaggaactccatgacgatgaacgcggtgtgcccgtcgacgcccgagtcgtagatctgcaccacattgggatggtccagccccgcggtggcgacggcctcgcggcggaagcgggcgccggtcgccggatcggcgctcatggccaggttgacggtcttgacggccacctcgcgctgcagcgtggcgtcgtaggcgcgccacacctgcccgatcgagccggctcccacccgctcgacgagacggtagcggccgtcctggagcgtggcgatcggcgtctcatgggcgatgtcgtcggtgcccgtgtcgtcggcacccttgccgctggtcacaggaccgccggcgccagggctggcggcagcaggaccggtggtcgagggctcggtgggccggggctggccagcggtggtgccggaggcggctgcgggggcgtcagtggccgggaggtcgggacgcgtgccgctcgccggtgtggcgtcggcgccctgcccgtcggaggccggctggacacccgcgccggaggccggctggtcacctgcgtcgggggacggctggtcgcccgggcggaccggcgggcggccggtggcatcgtcgttgctcacgttgtcattctcccgcaaatcgctgtgtggaatccatcgggacgtggcaggtggaccctgccagtggtgcccgtgcgcgtccgccgggaattccggtgggaaccatgaccctagcgccgtcggctaactcgaacgtgacggcgagggggtcggtgacggcgaggggctgggcgagacggccctgcccacttgaatgttcaccggagcactgcggaggtagggggtaccggccggcggtgtctgaccgcagataatacctgcacggcaaccatcctgatcaaccgtgctggtcgtcacattgtggaatccggcctgcgacaacaacttgatcgcggcatcggcgctcacccccaggctgctcacatcgggcaccgacgagcgtccggtggcgcggtacagggtgatcgggctggcgggatcgacggtggcgccggcactgggatcggtggccacgatggtgccggcggcgctctcggtgccctcctgtgactcgctggcgtccttcgtggcgatcgcggtgaacccggccgaggtgagcatctggcgggccacgtcctccgtcttgccgcgcacatcgggcagcctggtggccgccgggccgtcattgatcttcaccgtcaccgtggaccccacggccaccgtggtgctggcacccgggtcggtggcgaccacgcgtcccttggtgtcggccgggccggactggtgctccaccttcgggtcgagcttggcattgcggatggtcgaggtggcctggtcctcggagaacccgatcaccgccggcaccgtcgtatcgggggcggccttgttcgaatcggagttcatccggaacagcaccacgcccatcacggtgagcaggatcaccaggaggccgatcaacagcgcggtgggcgcactgacccggcgcttcttctttttcttgggcgcacgcggggcctcgacggcccgacgcggtggcgtggtcggtgcgctgagcggctgggaggccgagggcagcacggtggtggcgtcggtggccgacggcatcgcgaagggtgccggcaccacggcggtggcggcagtggccgcctcgccgttgagcacgcgcaggatgtcgtcacgcatctcggcggcggtctggtagcggtcgttggggtccttctccagcgacttcaacacgatcgcgtcgatgtcgggggtgacctccggatcgagccggctgggcggcaccggctgctcgcgcacatgctggtacgccacggccaccggtgaatcgccgatgaacgggggacgcccggtgagcagctcgtagagcaggcagccggccgaatagatgtcggagcgcgaatcgacggtctcgccgcgggcctgctcgggcgacaggtattgcgccgtgccgatcacggcggcggtctgggtcatcgtcgcggaggtgtcggcgacggcccgggcgatgccgaagtccatcaccttgacctggcccgacggggtgatcatcacattggcgggcttgatgtcgcgatggatgatgccgtgcttgtgcgagaaactcagcgcgtcgagcacgccggcggtgtattcgagtgccttcgcgggcacgatggtgcctccctcgtgcaggatctcgcgcagcgtgtggccgctcacgagctccatgacgatgtaggggcgcatcacgccggtggcggagtcctcctggctgccggtgtcgtagaccgacacgatattgggatggttcaggccggcggccgattgggcctcacgctggaagcgggtctggaaggtgggatcggtggccaggtcggcgcgcaggcgcttgacggccacctcgcggcccaggcgcaggtcacgggcctgccacacctcggccatgccgccgcgtccgatgacgctgcgcaactcatagcgatcgccgagcacgatgggtgagtcggtcatgcggatgctcctttcggggcagtgggtcgggcagtcgtcgggtgcggggcgggcctttgccctcgcagcgcaggcaatacctgtgaatatctcacgactgcaccgcctggaagacgcgcttggcggccacggtggcattcccggtggccgatccggcctggttcgggttggccaggaacaccgacagggcgacgtggtgctccttgtcgaagccggcgaaccacgaatagtccgaggcccccggcaggttctcggcggtgccggtcttgccaccgatcgtctggccggcgatctgggtggcggtgccggtgccggactgcaccacgtgcaccatcatgttctgcatcgacgccgcggtctccttgctcaccgcattgccgcgggactgcggatcgtgcttggtgagcacattgaggttgcggtcgcgcacctcgctgaccacatagggctgcatgaggttgccgtcgttggccagcgcgccggccaccaccgccatctgcaggggagtggccgagacgtcgtactggccgatcgagctcatcgcgagctgcgaggcgtcgagctgggcggggaaggtgctggtggccgaggtgaagtcgccggtgaacggcgactcgaagccgaacttgtcggcctgggcgcggatcttgtcggcgcccagctccatgccgaggttggcgaaggcggtgttgcacgacaccgtcagcgcatggtcaatggttgacgtggagccaccgcagttcactgcattgggcagcacgcggttggtgttgggcagcggcagcgtcaccggcgacgacacggtggaggcggcgctcttgccgttctccagtgcggccgaggccaccacgagcttgaaggtcgatcccggcggatagatctgctgggtggcgcggtcgctcatcgggttcgacgggtcgccgaccaggttctgccatgcggtctgggtggccggcaggtcgacgctggacagctgcgagggatcgtagctgggggaggtgacccagcccaggatggcgccggtggtgtagtcataggccaccacggcaccggtgcgtccacccagcgcgtccgaggcggcctgctgcacggcggggttgatggtggtctgcacggtggcaccctgcggattcttgccggtggcctcgtcgatcatgcggctgaagaactgggaatcgtcctggcccgacagctgcgagttgtagctctgctccagcccggtgcgtccgtagatataggagtagaagccggtcaccggggcgtacagcgcgccattggaataggtgcgctgggtgctgaagcggttgccgctcaccgccacgctctgggcgatcggcgtattgctcgccaggatcgaaccgcggtcggtgttgaactgcgaatcggtgacgcgccggttgctcgggtcgtcgttgaggcccttggagcggaagccgtagttgaaggtggcattcaccagcaacgccaggaacatgatggcggcgatcaggctcaccccacgcagtgacttgttcatggctccacccttccgatcatggcggtgggggccgattccatgtcgggatcggggttgctcgcggccgcggccgggcgcctgccggcgtgggagatctgcatcagggcggccacgatcacccagttggccaccagcgaggtgccgccctgcgacaggaagggcgtggtgagtccggtcagcggcagcaggcgggtgacgccgccgatgatggcgaacacctgcagcgcgaaggtgaagctgagcccgccggcgagcagcttgccgaagacgtccgacgaggtcagcgccgcacgcaggccgcgcgccacgatgagcccgtagatgaggatcagcgccatcagcccggtgaggcccagctcctcgccgatcgccgaggcgatgaagtcgctctgcgccagcggcaccagcgagggacgtcccagtccccagccgcgtccgaacaggccaccccatgccatgccgtactgggccgagatcacctggccgttctgctcgggatcgctgaacggatgcagccaggaatcgaagcgcacctgcacgtggccgacgaagttgaacgcgaacacggcggcgatcaggaacagcacgcccccgatcaccacccagcggatctggctggtggccacgtagagcatcatcacgaacagcccgaagaacagcagggccgtgccgtagtcgttctcgaagacgatcaccgccaccgcagcggcccacatcaccatgatcggcagcaggtcgcgcccacgcgggatgcggacgcgtccgatcgtcaagccggccagctgcagcaggtcacgatggtcggccagataggacgcgaaggccagggtcagcacgatcttggcgacctcggcgggctggaagctcatgccggccacgctcacccagatctgggaaccgttgagcgcattggcctttgaggccaggccgggcaccagcggcatcagcagcagcaccaggcccagcaggaacaacacataggggtagcgctgcaggttgcggtagtcgcgaacggcgaacagcacgcccacgaacagcagcacgcccagcgcggtccacatcaactggccgttcaccagggtggacgccggggggtcctggtcgagccggtagatcatcgccaggcccaggccgttcagcgcgatcacgcagggcaggatcaccgggtcggcgtagggggcgcggatgcgcaccgccaggtgggcgatcacgcacagcgccagccaacccagggagacgccgatcaggcccgccggcaggccaccatgcatgttgatggtggtgatcacgaacccgccgatgccgaacagggaggcaacgatgatcagcgccagctcggtgccgcggcgcttgcggtagacaaccaccggggtctcggtgctcatgggcaatccccggtgttgaccggtgccccgatggacccggcgccgcccgaggcacttgccgacgcgctcgccgatacggcggcggagggctgcggtgagccggcggccgaggcggaactgcgcgcctgacgcgtcgccacgcaggtggaggccacctcatcgaggtagttcgcctggttgcgtgcctggtcgagcgagcccgcatggatgctgcggccgcgcacctggtcggcgtagtagctggggaggtcggagatctgggtggagtgctgctcggccagggtgccgagccgcacgcccaccaccgagtcgggaagtcccttgtagatcgccacctggccgccggccggggcgatgtagaactgcgtggtcacatagtggtaggccccgaacaggccgccgccgatgagcaccagggccaccgcgatggcggtgatccacggccacttgcggcgacgccggcgcgtcatcggcgtgtagcggatgcgctcatcggtgtcggtgcctgccatcggggcgctggtccccgaggcacctgtcaccggagccgcagcgtccggtgggacggcctggtcgccgggttccgggacgccggcggcgtcgaccgccggcacgatcgcggtggggccgttgtcgccggggaccccggcgggggccaccttggggatgtccacgtgctctgccgcgcccagggtctgcggcggggctgcctgcagcgtcgggtcgaaggggacgacatcggccaggatcagggtgatgttgtcgtagccgccggcgcggtgggcggcgtcgaccagtgaggtgacggcccggtcgagcggatggcccagcatcagctcgcgcatccgctggtcatcgaccagcccacacagcccgtcggagcagaacaggagccgatcgccggcacgcagcgccagcgtcgggtaatcgggatcgtgggtcggctggccgttgagcaccttgagcagcagcgagcggtgcgggtgcacggccgcctcggcctcggtgatcttgccgtcgtccaccagcgactgcacccacgagtcgtcatgggtcaggcgcgccaggtcgccgtcgcgcagcaggtaggcgcgcgaatcgccgatgtgcaccatctgcagcacaccctggccgtacatggccccgcacaccgtggtgcccatgccgtcgagctggtggtcccaggcgatgagatcggccagccggtcgttggcgcgattcatggcgccggccagcacctcgagcatctcgtcgggcggcctgggcgcgtcggagcgcttcagttccgcgatggccaccgagctggccaggtcgccggcagcggccccgcccatgccgtcggcgaccaccagcatggtcggtgacacataggccgagtcctggttgttgcgtcgcaccgggccggtctcggagtgcgcccggtagtcgaggctcaatccaccggatgcggcaccggggtccggtgtcgcggtggagtgggcggaatcctggggatgcgccgtcgccggggggcgatgagctggatcagtcacgctcagcgctccagcttcagctgggtgcgcccgatgcggatgacgtccttggccccgaccagcgtgggctgcacgatgcgcacgccgttcacataggtgccgttggtcgactgcaggtcctcgatgacccaacggccgtcgtcctgggggtacaggcgcgcatggtggctcgacgcatagtcgtcatcgaggtcgaagcccgagtcggtggccctgccgagcaccagggccccgggcaggtcgacgcgggtgccggtctggttgccggccaccaccacgaggtgttgcagctcgcggcgcttgggcttctcacgacgcttgcgggcagcctgcttcaggccggcggcaacgattccgccattcgtgacggtgcggccgatcaggtcgccgcggatggtgttggccacgaacaggatgaacagccacatcagcacgagataggccaccttgatggtggccagcaggatgccggtcaaggtcaggtccccacaggcgagtggacgagcatccgcgtggagcccatttcgatgcggctgccgtcttccaggggactgtgggtgacgcgctgtccgttgacgatgacaccgttggtggagcccaggtcgtcgatgctgatgagcaactcgccgtcggcgttctccgacacattgatgcgcgcgtgcttgcgtgacacgcccggatcgttgatgcgcaggtcggcctcggtgccgcgtccgatggtgaatcccggcggcatcagcggatggcgcaccccgttcacctcgagcaccagcggtgcccggcggatcatcgtcgacgatgccgccccgccgttctcggcgacggtggccaccgaggcgctggtgacctcgaagcggccggtgggcagcgagtcatcgagcacatattcgatgtggatgggcccgtcgaagacatatccccggtcggaaacgtgttcacgcaggtcgggcacgatctcggcgttcagggtgcgcgaatagggcgccagccggtcgtagtcatgggtggacaggtgcacctggaagtcattgggcaccaggcgcttgtcgcgcgacagcagctttgcctcggaatcgagctcacgctgcaggcgggaggcgatctcaacgggttgcacatcacccttgaaggcgcgcgcaaagacgccgttgacggcgctttcgagcttcttctcaaccctgtcaaacagccccacgtgtgcccctcccatctggcatcagtgcacgatcctagtgcgcacggcctgtcacgacgcagtcaccggatccctatcgggagcctgcccggcgtctcaaagcgctgatcggatcacacgctcactggttgattctgccagtgaacgccgatcaatgcgcgcccccacccctactcccgcgtggagttcgcctcaatgtctggctgagggttgtcgtcgccggtgctgtccccggaggcctcgcgctgggccctttcggcctccagcgccgccttcacgtcgagcttctcgatctgctcgatgagttcctcgagggcggccctgggcagcgcgccggcctgactgaagacgatcgtctggtccttgagcgccatcagcgtggggatcgacgtgatgttcgccgccccggccagcgactgctggtcctcggtgtcgatcttgccgaagacgatgtcgggatggtcctcgctcacctggtcatagatcggcccgaactgcatgcaagggccacaccacgacgcccagaagtcgagcaacacgatctggttgccctcgatggtctcggtgaagttctgttcggtcaccgtcagcgttgccaatgtgtcctcctatgagcgcatggtcctctggttggcgcaggtgtccccggcgcacggtggcccgcgaacctgccctggcgggctgacggggccaactccagtcatcgaggctagcgctgcgcgcgaaacgagccgtactaccgcggtccgaagatcgcgcgcagctgctcagggtcgagcttgggacgacgctgttcgtcgcacagcccgttgacctcctgggcggtgtcggtgagctgggtccagcagaacccgcccagcgcatcgcttgaccggatggcggtcatgatcgcggcgaggcgacgacggaagccccgcgcggtgcgcaccgacgaatagccccagccgccaccgcggcgggccgcgccgggggcgaagcgcacgccgccacattcgtcgagcagcatcggtagctgggtgcgttgttcgtcgcccagcacgatgaaacgagccgccgggcccacctggtcgcgggtgcgcagtcgttggacgcccttgtggcgatagcggcgacgcagcaccacggcgcgggccgtgtagtcgtggagggtgagcaggtcggagtcgacgtgctgccagccgtcgttggacagggctggccgggtcgggtcgaggtggcgggtgagcgtggccatcgccgtggcgaaggcggcctgttcggcgtcgtgggcgatccccggcacgccccacgactcgttgatcggcacccagcacacgatgctcgggtggctgcgggtggccagcaccgtgtcgctccattcgcggcgcaaccggcgggccgcgagcggggtgtactccattgcattgccgatctcggcgaagaccagcagcccggcccggtcggcgcggtacagcaggcggggatcgggggtctgctggtggatgcgcaggccgttgaagccgaggccggcgatcagggcgagctcgtcgtccagggcctgcacgtccggcggcgtgtagaggctgtcgggccagtagcactgctccagtacctggcgcaggtaggtcggttggccgttgatctccaatcggcgcgtgccgacgctgacgtcgcgcattcccacgtagctcgtcacacggtcgtcgccggcgctgatggtggcgtcgagcagttgggggttggcgggcgaccatgcccagcggcgggcgtgggggatgctcacccggatccgtccggcgcgttcgcgcagggtggcacgggtggcggcgatgggcttgccgccgagccccagggtcaccgtcacgggcacaccgcggcgcggcgcgtggttgagctcgatcagtgcgatggcggtgccctcgcgcagcgacacccgccaactgagctggctgatgtgggtgtctggcaccgattccagccagaccgggcgccagatgccggtggagcgttcgtaccagatggcgtgcgggcggggttgccagtcctgcttgccccgcagctggctgcggtcggtggggtcgtcgtgggcgcgcaccacgatgtggtggtcgggtccggggccgaggcagtcggtgatgtccagggtgaaggcgctctggccgccctggtggctgccggcctccgtgccgtccacccagacgatggcgtcatggtcgacggcgccgaagtgcaccagcagccgccggccggggccatggcccagcgattccagcatgccggcgggaatggcgatgcggtaccagaccaccggatggaagccggtgtcgccgatgcccgaggcgcgcgactcgggtgggaacggcagcctgatcgtgcggtcgaaggcctgtgcgtcgcggccctcgcggaaccatccctggcgcaggccgacgtcctggtcgtcgtgggcgaatccggcccggccctccagcagtgcccagtgcggacgcaccatcgtggggcgggggtggtcggccggtgggcgggagccccggatggggtcggccggtgggcgggagccccggattgaatcaccgggtgggcgtgagccccggggggtggccatgggactccttcgcgtcgggtcggcgggaactgggctggcaggggttcgatgggggtgctgatgggccttgccacgactgtagcgagcgccctgcggggcaccaccggaagtcacatccccggggaacgggcctcacaagacacgcacaggctccgcgccaattctggggccatgaacacgatgaatggaccacaggaagtgtcggtgaacaggcatccgtggcgtcgccgtttcgtggcgctcggctcggccgcggcgatcgcactgggcggcatgacattcgtctcacccgccgaggcgcaggcggcaggggtgcagcggcccaccctggtggtggtgcaaccgagcacgcccacggtcgtggacggcgacgcgtcatcgccgaagggcaagcagtgacctgcggggccggccggtgagctgacggcccgccccggccggcccgccggtaggggatgtcgatcgcccggcaggccggcgcctgacgtcgggaatggttcggacgcgagccctcgtgccctattgtctttcccgcggagttcccccttgcgttgccgattggcgggtcagcgcggcacgcagcgatgaaggggaactgatctgtgctgaatgctggcgccagccgcgacggccttgtcgggaggattccggccgggtggcgcgaggcctcgggatatgccgttgcggcggtgctggcgggcctggtggtggcccatctggccgaggcccttgaattgatgctcttcgtcaatgccgattccctggtgacggtgctgatggccaggtcactggccgccggccagccccaggactgggcgatgtcgccggtgttgttcattccggagaccgccgtgtatttcctgctcgcattgttcgggatgggtgtgcgggccaccctgatggctaatgcggcagtgaactcctggccctgtacgctgcaattcgatttgtcgccggagcaaggcgccccggtgaatggcctgtgcggcgctcgttggcggcattttccggcgtgtgcctgctggcacttctggacggtgcggaacgccggggatatctcctggcgtcggacctggcaatgaccacctattactcgggcaccgtgatcggcgcggtggtaaccctgggattattgcgccgggtgaataccatgcggtcgggtggcgccggtcggcacgtgatgggcgccaccctggccacggcgggcgtcgtcgccttctgcacgatgacgaatcccctgtatgccttgtggttcgtccttccggcgggcgccgtgctgctcgtcctgcgggtgtgcagtcagttgtcgtcacgggcgttgtgccgggctggcctcgtgttgtgtgtgggaacggccctgggcatggcattgcgcatccccttcgcccactcgatcgtggccacgacggaggactactggcatctgcgggacatcggtgcatcgttggcctaccacgcgaggcaggtctcggacaccctcgccactcgcgccggcattgcgtcattgtgcataacccttggaatgtggattgcctcgatcgtcattgccctcgccgtggtgcgtcgggggaaggtcgtgcattccttcattgccctgagtgcctgcctgggccccttcatcgtggcggtggcggtgattgtgatgggcagtgaggccactcgctatctacaaccctgggcgttcctgccctttctggcactcactgtcctgccgggggttgaattcgcggcacgaggaatatcgcgccggattcttgcctggttgccggcgcgggaatctatcgggactctccgggcggcgggtgttgtgggtgcggccatattcctcggcgtggtgtgcgcactcaccatgccgaggatcaatgcgacggtttcggtcgtcgacgccgatctgcgctgtgtcacggattgggttgatgcttccggacgcacgggtgccggactgttctggacgatgcgggcccccaaggcatatgcggccgatccacgccagatcgtccaggtcgatgaccagctccatgcgggatcgtggctcgcgaatcgccatgacgccgtcaacgcacaggtgaccttcttcatcaccgacgccgattcctatcccttctcgtttccggacgcatcccctgccggaacgatggatgtcatctcctgtggccgctatgccattcacgacttctatccggtggtggcgccgttgaaaccagccgagcgatgatgccgtgcggcgccagccggtccattggcagtgcggcgctagccggtccattcatcggccagcagcgtcagggtgttgatggcggccgtggccgccatcaacacgagcgtcgcccagcgcaaccagcggcgtcgggtggacagtgcggcggccatggccaacatcaccgggaagcagtccaggccattgcgcggcagcgacagcagcaccgggccgcggcacaggctcaccagcgtgatcgccacgaacaccagccactcatagcgccgcagtcgccaacaccaccacagcgtggcgaggaagattgccaggaagacgaactccaacacctgctggtagccgatgaaccattcggccgagacgatgtgccggacgctgttgaccaccacgtcccagatcggtgccgagccacgtccccaaccctcggcctgcacgtgcagccagtagaggggatcgccggtgcgggcccacagatagcccaggtagcccagcggggcgcacagcgggatggccagggtgagcacgcgccaccatgaccggttcgggtgcggccagccctgtcgcagcatcatcaccagcagcatcggcaacaggaacacgccattgacgcgcaccagtcccgccgccgtcgccgcgacgagcgaccagttccaccggcggtgcatcgccaggtaccagcaggccagggcgcaggtggtgaacaggccctcggtgtagggggccatcaggaacaccgaatagggccccagcaggaagaccccggccgctgcatggggacgcacccgtccgcccgcgaactcaccggaggtgaggtactcccgggtgatgcgcacgagcagcaccccggccgccaacgctgccagccaggagacgatcgtgcccgccacgacggccgcggcgatcgacggatgcgccccgccccacaacgacgcaagcgcccgggtgagcaggggaaagccggggaagaaggcctcatcgtgggcgggatggccactgtcgaaggcgaaatagccctccgaggcgatgcgcatcaggtgcccggcgtcgaagcgctgataggcgtcgacgggccacggcaatccggtctggcggggcgtggcatgtccggtccagcccaggatgagcgccgccagcaggtagacggcccgggaggccacccaccaggtgccggcgatgcgcaggtcgcgacgccatccgcccgtcggatgtgcggcgccgggggccgtggtggccggtgtgggcgtcgacgctgtcatggctggaacttccggtgggcgacaaagggcccgcccatcatgtcaccgtgggtggcagggatgggcgggccgatcgtcagttcagtggtcaaccgatcaccgcgggcgccggggtcataaccgggccggggtcacaagcggacggcgcgcaggcgcagcgagttgccgatcacgctcaccgaactgagcgccatggcagcggccgagaacatcggcgagagcagccatccgaacgcggggtacagcacgccggcggccaggggaatgccggcggtgttgtagaccagcgcgaacagcaggttctgccggatggtgcgcatcgtggcattcgagatgtggcaggcgcgcacgatcccgtcgaggtcgccgccgatcaacgtgatgccggcgctctcgatggccacgtcagtgccgccacccatggcgatgccgacgtctgcggcagcaagcgcgggggcgtcattgatgccgtcgccggccatcgccaccacgccaccggccgccttcagctggttgatcacctgcaccttgccgtcgggcatcaccccggcatgcacctcatcgatgcccaactcatcggccaccgcacgggcggttgcctcggcgtcaccggtgaccatcaccggatgcaccccggcatccacgagcgctgccagcgccttgcggctggtgggcttgagcggatcctcgatggccagcacggcggccggcttgtcatcgacgctcacgaacaccgcggtcgcaccgcgcgtccgcatgctcgcggcggcggccgtgagctcctcgttggggcgggcgtgctcctcgttgccgatgcacacatggtgcccctcgacggtgccgttgatgcccgcgccgctcgtggcgtggaagtccgacacatcggggacggtcaacgtgcgggtggcggcggcctccaacacggcacgcgccaggggatgctccgaacccttctcggcgccggccgccaggcgcagcacctcggactcgtcgtgatcggcggtggtctccacctgcgtcacggtgggatgccccatcgtgagcgtgccggtcttgtcgaccaccaaggtgttcaccttggacagttcctcgagcgcctcggcgtcgcggatgagcacgccggcagtggcggcgcgtcccacgcccaccatgaccgccatcggggtggccagccccagggcacaggggcaggcgatgatgagcaccgagaccgccacgacgatcgcatggggcaggcggggtgcgggcccgacgagcatccacacgatgaaggcgatcacggccaggccgagcacgatcgggacgaaccaggccgccaccttgtccaccagcccctggatgggggcacgggaacgctgcgcgctggagaccagcgcgatgatgccggacaacaccgaatcatggccgagcttgtcggccttcaccaccaggctgccctgggtgttcagggttccgccgatcacccggtcgcccacgtggcgggccacgggcatcggctccccggtgaccatcgactcatcgatgtgggaggcgccgtcggtgaccacgccatcgaccggaaccttctcgccgggatgcacacgcacccggtcaccgacctgcagcgtgtcgacggcgacctcatgctcggtgccgtcgggcatcaccagccgggccttcttgggggccaggtcgagcagggcgcggatcgatccggaggtgcgggccctggcgctgagttcgatcacctgtcccagcagcaccagcacggtgatcatcgcggccgcctcgaagtacggctccacggtgccctgggcggtgcgcatcgtctgcgggaacacgccgggcgcgatcgtggcgatcaacgagtagacataggccacgccggtgcccatcgagatgagcgtgaacatgttgagcttgccggtgcgccatgagatcgcgccgcgcacgaagaagggccagccggcccacaacaccacgggggtggcgagcaccagctcgagccaggcggcaagctggtcgcccacggcgtccatgaagccaccgaacagcgggcggaccatcgacagcaccaggatcggcacggtgatcaccacgcccgcccagaaacggcggcgcatgtcggtgagttcggggttggtgccggtcctggcggtggtcaccacgggttccagtgccatgccgcagatggggcaggccccgggatggtcgacacgcacctcggggtgcatcgggcaggtgtaccaggtgacgccggaggcgtccgcctgatccgacggcgcgcccggcgcgggtgtcccgtgaccctgcatgtcgtggccgtgcatgtcgtggccctgcatgtcgtgaccaggggtggtgtggtcatgcttcggcgtcgtgccggatgccatggttgcggcaggcgtcgcatgatcggtggtcatcgccatcgggtggttgccctgcgtggacgacgaatcagcggggtgcgacgggccagcggagtggtccatctgcatcggggcgtgaccatctgatgcgccagccacctcgtcggcgggcaccaggttcatgccgcagatcgggcagcgtcccggcgtggcctcgcggatctgggggtgcatggggcaggtgtagaccgcgtgcgcctgcggggcgggcgaaccgccctgctcgtcggcgggcaccaggttcatgccacagatcggacaacgccccggcgagccctcacgcacctccgggtgcatcgggcaggtgtagaccacgccgggacccgtgcccggcgtgatcgtgggatgtgacgcttcactcatagaaactcctcacctgatgtatacccccggggggtatcaggatcaaggtgttaccgtgcgtgggacgttcccgggagcggtcgcggccggctttgacccgcgaccgcgcagggtcactccttgtcgaggtccgatgcgatgagcgtcgccaattcgtccacggcggtggcgtcgtcggactcgatgttcaccgtgtcgcccttcttggcgcccagggtcatgatcatcagcggggaggctgcgtcgacgggttcctcgctgctgccgaccttcgacagcaggatgtcgtcgtcatattcgccggccttgtcggcgatgatcgcggcaggacgcgcgtgcagaccgattgcggagccgacgactgcttgcttgctggccatgttcttctcctcatatccgccacggggcgctggctccgggctgatcgacgacggggacgggcgcgtccccgcaggccccgtgatgggccctcgttcacccttaatactcacacactcgcgggccctgcgaggggcttcaccagcactgtcggcgcggatttggcagacgcggttcgccggggcgtcctacgtggaacactgggtaatcaaccattcagcgttgaagggggagcgccccaatgtctccagcaaatccggctccaggaagcactgcgttggcgggcgatgcactcgtggtcaccggcaccggcgtggtggccggagtggcctatgcgccggtgaaccgcgtgcagccgcgtccacagctgcccagcggcggcaccatcgccgaatctgagcaggaccaggccgtcaatgccttcgccgatgcggtggtcgccgtgcagaatgtgctgcttgacaaggctgaacacgtcaccgggcatgcccgggaggtgctcaatgccactgcccagctggttgccgatcgtggcctcacccgggcggtgaagaagctcatcaagcatggcgattcggccgaatgggccgtggtgcaggccacggacaacctggtggcacagttcgatcggctgggcgggctctacgccgagcgcaccaccgacctgcgtgacatccgcgatcggctggtggccgagctgcgcggggagccggagccgggcgtgccgcgtcccaagagcccggtggtgctgttcgccgaggacctcgccccggccgacaccgcggggctggaccccgagctcaccgtgggcctggtcaccgaggccggtggcaagacgagccacaccgcgatcattgcccgccagctgggcatcccctgcatcgtcggcaccggcgtggcgctgcgcgagatcaagaacgacaccacggtgctggtcgacggtgccgcaggcaccgtggtcgccaaccccgacccggagcaggccatggccgcggtggccgagtcgaacgcctatttcaaccgggtgcgcgaatggcggggcccggggcgtacgagcgacgactacgcggtgcagctgctggccaatgtgggtgacggcaacgccgccggcaaggcggccgcgggcgagtcggagggcatcgggctgttccgcaccgagctggccttcctcagcgcctccgaggaaccgtcggtggccgagcaggctgagatctaccgttcggtgctcgagccctatgccgggcgtggcggacgcacccatgtggtgatccgcacgctggacgcaggctccgacaagccgctggccttcgccaatttcgacgccgaggcgaatccggcgctcggggtgcgcggactgcggctggccgccgacaaccccgggctgctcatccaccaattggatgccatcgccgaggcacgcaagggcattgacgtcgatgtgtgggtgatggccccgatggtggccaccgtgggcgaggcccgcagcttcgcggcgaagtgccgcgatcgcgggctgtggccgggcgtcatggtggaggtgccggcggtggccctgaaggccgagcaggtgctggccgaggtggagttcttcagtatcggcaccaacgacctgacgcagtacacgatggcctcggatcggttgtcgtccaagctggtcgacctgaacgatccctggcagccggcggtgctctcactgattcagatggccggccatgccgggatcaagcgtcacaagccggtgggggtgtgcggcgaggccgccgccgatccgttgctggcctgcgtactggccgggctgggcatcacctcgctgtcgatggccgccaccgccctgcccgccgtgggcgtgcagctcggcgatgtgacgatcgaacaatgccgacaggccgccgaggccgccgtccaggcgccctatgccgtggctgcgaaggccagggcgaccgccctgctcaagaaatagggcgccacggccctgctcaagaaatagggcgcgacgccctgctcacgggatggggcgcgacggcagcgtccaagcagcagggcgcgacggaccggtcaggaaacggggcacgcggatcggggcaacggctcagtagccgcgcaacttctcgatctcgcggcgttccttcttggtgggtcgtccggttccgggatcgcgtcgggcgaccggcgcggacagccaggccggtttggccggtgacaggtcacggtaggccgtcacggccaccttggccccgacgcgcttgttgagcagggtcaacacctcgaagcgacggtcccagccgggccggcgcacggtgatgatgtccccggggctcacctgttgggacggcttgacgggcgcgtcgttgtagcggatgtggccgcccttgacggcctgggtggccatggagcgcgtcttgaacaggcgcacgctccacagccagacatcgattcgggtcatcgttcgcctcccggtgccttccagtatggtcgatgcactcagggcgcgtccgggtcgaacacgtcggagcggaagcgctggggcaccggcacgacgcggtcgtgttgccagggcttctcccacccacccaggcgcaacaggatgtcggtgagcaggccggtgaagccccacaggaagaggtcgtcgaactgccaagccggcccgatgatgctgtcggggcgcagttgggcgctcacccgatggctcggatcggccagcttgctcaccggccagcgctggatgctggccacctcgctggggctggccaccaggctgttgtcgggacgccaccagccgaccaccggtgccaccacgaagtggctcaccgggatctccgccgacggcagggtgcccaggatgttgacctcggctcgatcaaggccgacctcctcgcgcgcctcgcgcagggcggtgtcgaccagattgtcgtcgtaggcctccgcgtggccgccggggaaggagatctgccccgaatggtgacgcaggttgcgggcgcgcaccgtgaacagcacggagggatcgggtccgtcggacagcaggatcagcactgccgaactgctgtcgtcgggctgggggtgctgcaggcgcgacagggccgcggggtcggggctggtcagcgccgtctgcagcccccgcaacgacgagggaacggctaggggggaagggatcgtggggggattggtctggccggtggtcatcgttctctcttctcagggcgtgcctgcggcacgcatcgtgtcgggcgcacaacagtccgtgcccggtggaatgcctcaccggtggtcacggcgagcgcacgagcctttcggcctcgtcgggatcggtgggtccgatgccgaagctggggcacagcccggccaccgggcaggccccgcaggccgccttcttggcgtggcagcgcgcccggccgtggaagatcagggtgtctgacagcagcgtccacaccgactcgtcgaacagggcgctcacatcgcgctccacggtgagcggcttggtcgagctcgtgaagcccaaccgcttgctcacccgcaacacatgggtgtcggtggtgacgccggggatgccgaaggcatggccgcgcaccacctgggccgtcttgcgtcccactcccggcagggaggtgagctggtcgatctcgcggggaaccaccccgtggaagttctcggtgagcgcctgcccgatgcccacgatggccgtcgccttgttgtggaagaagccggttggccggatgatctgctccacctcgggcagcgaggcagcacccagcgcggcggcgtcgggatagtggtcgaacagtatcggggtcaccttgttgacgcccttgtcggtggtctgggccgacaacaccgtggctaccagcagctcgaaggggtcgtggaaggtcagcgcgcagcgggcgtcgggataggtctggtgcaggatccggaagatctcgtgggccgcggccacctcgccggttgcgcggtcagacccggcggcagacttcccggcgcccgtcgatgcgttctgttcgttcatcgtgttcccactggccatggccgtgtcacaggctcgcgaccaactccacctcgacgcaggcgttcttgggcaggacggccacaccgaccgcgctgcgcacatggcgtccctgctcgtcgaagatctcggcaagcaggtcggaggccccattggcgaccgcggcctgttcggtgaacccgtcggagctggccacgaacaccatcacgcgcacgatgccggtgatggcatcgatgcccccggcgatgtcggccactgccgccagcgcattgaggcaggccacgcgcgctgcggccgtggcggccttctcgtcgatcggaccacccaccagtccggtggtcaggcgaccgtcgtgcaggggaagctggcccgaggtgtacaccagatcgcccacgcggagcgccggcaggtaggagcccaccggcgtggccacgtcgggcaaggagatgcccagggccttcaacttgtcactgggcttgctcatggtctggcctcccgcttgaaatagccgaccaaggaatcggcgttcggtcccggaaccacctggacgagctcccagccgtcagctccgaagttgttgagaatctgttggctcacgtggctgaggatcggtgcggtgagatattcccaccgcacctggtgcccctcggggcgtgcttcgtcattgctcatgggtggcctctcccgcgccctggcgcggatcgtggatgggctcaagcggcagtccgaagcgtcgtcgagccggatgggttgcggcgcgcagtcgcgaggattgtgcgtcggattgctgcgtgagcactgctgcccacgatttcacctcgggacgctggcgcaacagctggcgccgctcccgctcggtcatgccgccccacacgccccactcaatgcggtggtcgagtgcttcggcaaggcactgtgcgcgcacgggacaacccatgcacacggtcttcgcccgcttctggtcccggccctccgggaacagggcatcgttcatgcctcggcatcttgcctgcagcggccagtcctcaacatcagtaacagccatcgggcgccccccttttcgcgcgatacctgatccgccaaaaatacacctgagacttacactcagtgaaccccctgcgttgctctcgtccgttgagatccccggaccgcaacggtgcccgtccgggagcgcagctgagggcgattcacagctggcgcaacgcgtccattgtcccggttgccggttaggctggcaagcatgagttctcggcaaggcgattcgcggctgtattcgttcgtgattctggccgtactcagcgtgacctgcggagtgttcattgccggcatgggcatccccttcgccgcgctggcgagcgacgccgcggggtcggcgtcgagcagcctgaacaacgtcaccacccagctgacgattccgcaccaggcggaaaactcacagatcctgttggccaatggcgacgtgctggccagcttcttcgaccagaaccgcgagccggtgggcctcgaccagatctcgccgttgatgcagaaggcacagatggccatcgaggaccatcgcttctacgaccacggtgcggtggacgcccagggcatcctgcgcgctgccctgggccaggtggtcggcaacagcggtggtggttccacgctcacccagcagtatgtgaagcaggtgcgcatccagatcgcccaggacaatggcgacacgaaggccgagcaggaggcccaggcccccacgatgagccgcaagatcctggagatgcgctacgcagtggccctggagcaggagctcaccaagcagaagggcagcctgaaggccgccaaggacgccatcctggagaactacctcaacatcgcctattacggtgacggcgcctacggcgtgcaggcggccgccaagcactacttcggggtgaatgccaaggacctcgacctcgagcagtccgcgatgctcgccggcctggtgcagagccccagcgacaccgaccccgtgaaccatcccgacgcggccatcgcccgtcgcaatgtggtgttggagcagatgctcaagtgggaccaggagggcacctggttcaccggatccccccagctgacttccgatcaggtgcagcaggccaaggacatcggattcgaccagtcgaaggtcaccgagaactactcgggctgcgcctcgtcgaagtatccgttcatctgccagtacaccgagaacgtgctgctgtcggaccagatgagttcgctgggcgccgaccgtgacgcccgcaagcgcgccctgtaccgcggcggactcaagatccagaccgtcgtcgagccggacgcccaggatgcggcccagtcggcgatcaccgccctggtcaagccgaccgacccggtggtctccgtggcggtgatgaccgatcccaagaccggcctcatcaaggccatggcgcagagcaagccggtgatgggcaccaacaccgatgccggcgagacctactacaactacgcggtgggccaggacatgggcggtgccgagggctaccaggcaggctccaccttcaaggccttcgtggctgcggcggcgatcagcgagggcttcatcccctcgcagacctactacaacgcgccggccacgaagaactgggagggcaccaccttcaagaactgcgacggcaacttcgtcttcaagtcgggtgacggccagggctggaccgtgtcgaactcgtggaagaccggcaacatgaacatgctcaccggcatgggggcctcggtgaacaactacttcgtggccctggagcgtgacgcgggcatctgctcgtcgatcaagatggccgagacggtgggcatgcagctggccgactcgaacacgcccatggagaactaccagaacgtgccctcgttcacgctgggcgccctgaacgtgacgccgatctcgatggccgaggcctatgccaccttcgccaaccggggcatccactgcgaccccgtgatcctggcgtccgccaagaccgctgacgggaacagcctgccggtgcccccgggcaactgcaagcaggtgatcgacccgacggtggccgacggcgtcaacctggtgatgcaacaggtgctgaagaccggtggcaccggcgtggccagcaaggtgcccggcaactacgaccaggccggcaagaccggtaccgcaggtagcaccgagaccgagtcggcggtgtggttcaacgcctacacccccgagctcgagggcgtggcgatgatctccgttgatccgggcaacacctactggaccggccgccagcagaccctcaccggactgcgtaccggcagcggcgccgtcctgtcgggcaactccaccaccgagtccggtggtatctggaaggcgatgatgtcggcgcagctgccgaagacgcccgccacccagttcgcgccctacaccccgaccaccacttcgatgcccgccgcctacacaggacgctcatgacgcagaaaccatcacccaccgggtcggccgtggcccaccgcacgtcggcgctgaagtccctgatgggtgccgggttcgggttcggggcctcgatgctggcgggcggcctggtggaggcacatgccttcctcatccgccgccatcggatcccgatcctggcgccgggcagcgcgccgatccgcgtgctgcacatctccgacctgcacctgctggcgcgccaggacgatgccctgcgcttcctggccggcctcgcggccctggagcccgatctcgtggtgagcaccggtgaccatgtgtccgaagccagcgccatcgcccccatgatggccgcgctcggcccgctgctgcgcctgcccggggtgttcgtcttcggctcgaatgacttcgtcaagccgcacttccgcaatccgttgggctatctgtggcgcggcgccaccggccggcaccaacgccaccacgccgacgatcccgcgctggccctgccgaccggcgagttgcgcgaccagctggcctcgcacggctggacctacctcgacgacgtcgacaccaccctgtcagttgccggccgccgcgtgcagctgcgcggcaccggggacgcccacgtggggcgtgaccactacgacgcggtggccggacccctggacaccggggccgacgtctggctgggcgtcacgcacgccccctaccagcgcgtgctcaatgcgatggtcgacgacggcttcccgctgatcctggccgggcacacgcacggcggacaggtgtgcctgcccaccggccggccgatcgtcaccaactgcgatatcgatccgggccatgccaaggggctgagtcgctgggaacatgacggggcggccgcctggatgtacgtgtcggccggcatgggcacctcgccctatgcgccctaccggctgttctgccgcccggaggcggccctgctcaccctggtggccagcgacacccgggaatgacgcgcgtcggcaggccctgcgcggggcagctgcgggcgacacggggaacccgggtcggcgcgggcaattggtggcgcagggggcctttgggttagactgatcgacggctttgcagctgtgctccgacatgtcgggcatgactgtcagcttcggggtgtggcgcagcttggtagcgcgcttcgttcgggacgaagaggtcgcaggttcaaatcctgtcaccccgacagatggtgaaggcccggtggatatccaccgggccttcaccattctgtggggagcctcgtggtcctcaggccactggcaaccccgtggccccaggccactggtgacgctgcggcgctcaggccgcctgcaacaccttgccccgttggcgctcatggagctcggcgcgcgtcggttggtgtcgcaccatcagatagggcgccaccatcgccggcagcacgagcaggaacaccgggaacaccgagcgggtgaacaccagcgagatcaccgccagcacgccggcgaagatgagctcactgcgggtggaacgcaacgcctcgcggaacgagatcgccgtggagtccttcggcgtcaccaggaacaccgagttgccgaacatcgacttcagcgacgatcgcaggctggtgaagtacatcgacccgtagagcatcatcgagccgcccgagtagctcagcagcttcgtgtgggccatcctcgcccagtggaagaccacgtcgttgaccatgggggccaccaggaacgccaccgtggggatcagcatccacagcgggaactggaaggaggcatgcatcatcggcagcacgacgacgttgatcaccacgaacaccgagaacaccgcggtcagcggcagggcataggtgaacagcacgatgtcgagcttctcgtaccagtgcagctggcgtgaggtcatgatcggacgggtgttcttgcggatgaactccatgttcccctgcgtccacttgctgtggcgcttgcggaacgccaggtagtccaccgggaactcctcctggcaggtcacgtcgggtgcgaacacggtggtgtacccgtgctcgcgcacggccagcgagaagcacaggtcctcggccaccatcagcgggaagcccccggcggcgtcgaaggcctgcttgctcaccatggcgccatggccgagcagcgacaggaacccgtagcggttcttcaccgactggtagaccggccagtgcgagtccacccccagcgagaacttctgttggaagcgggtgacgttgcgcgtggccacgtgggtggcctgcacgatgccgatcgactggtcggacgcgaagtagtcgagcatgcggcggatgaaccgcggcgggatgatctcgtcgctgtcgaggatcacgaaatagtcgtagtcggctcccgtaaggtagttgttgaggtttcctgccttgaatccgacatggttttcacggcgtaccacctgcacatcatgggtggccgcgaagatatctatcattgttaggtattcgggcttgtcggaatcgtcgaggatgacggtgtgcacgtttgtgtaccgctgtttcatgctggcggccagcgagttcgcgttgaagtcattgcgggtgcagtacaccatcaccacgcgcggtgggtgacggtgcagtttgcggcgtcgtaccgggcggatgcgtccgcgcatcaccaggtagtaccaggcggtgtagagcacgtccttgatgccgttcagccagaagtatccgatgaacagcagggtgaccagggcgagtaccccggcaacgggccgttgcgtgatctcacggctcagggagccggctgtggtgagcagggccagcccgaagagggctgcccagacgagcaggatcacgcggtagagagcgggagacttggtcatgcctggtcgccagtgcccttgcgtgcggcgcggcgtcccacctggatgccgatgaacaccgcgatggcgagcaggagagccacgcccaccgcgatgccgatccaggttccggtgctcaacgccaccgttgagattgcccccgtggcaaccgtgggattcgttccgttttcgtacattgctacctccgaaatggggaccgggcctgtcgcagggctggaggagggggcggagataaatccccccacccatgagcagaaccgggttctgatagagcgctgcgacggggcgtcaccgtgttgggacgcgccttcggggtggtggcagtgtgatgcggtgccgacggggagtccccatcagcacaaacggactatcttcacttgtggacccgatgttaggtcactgatcgggcaaggtaacaaaatttcacaaatggcttagaaaaccgggtacctgaatgatcgtgatcgacatttgtcggtgatcccggtgtcattggtggctccggcgccgggaaaatgcacgtgtgcaccatacgagggtgcacatcgggcgcggggccacctcagcggtaattcagcgcaatcatcatgccggcctcggcatggtagatgttgtggcagtgcatggcccaggcgccgggattgctggcctgcagttgcaggctcgtcgacgtcatcggcggcaccacgacggtgtccttgcgcacgccattgggcagcgcgaaggtgtggccgtgcaggtgcaggggatggctcatcatcgacgagttcgtcacgtcgagctgcacccgctggccctcgctgaccccgatgggcgtgttcttgccgaagacatcaccattgatcgtccacacatagggactcatcgtgccggccagcttcacgtcggcatgggcgtccacgtcgtgcgcgggcaggcgtgccgcgtcggtgggggtcagctcgccggcccgggtggcgtcggcgtccagctcggtggggtgcacatctgcggacggggcgtcgccggcgccggtgcgcaccagcgccagggcctggccctgcttgccgaagggttgggccaccagcgggaacacgccgtcggccagtgtcacgagcacgtcgtagcgctcgcccatgccgatgtacagcgccctggtgtcgtggggctgcacgggatagccatccgtgtgggtgatgctcatcgtgtggccacccagcgccaccttgaacagggtgtcggaggcggcattgatcagccggatgcgcacccgctggccgggcttggcgctgaaggtgcgcggtgcggcggggatttccccgttgatcaggtagtgcgggtaggcgacgtcgcccaccgagccgaagggcgagtcgcccatcatggagccgctggaaccgttcatgccgcccatgccggaaccgtgcatgccacccatgccgcccatgccgcccatgccctggctcgacgacgacgaggagtcgtcgccaccgctggacttcaggtcggcgaagacctggtcgggggtgcggccggtgccgtccacccagtcgtccagggtgaccacccattcctggtcgtagccaccgggctcggcggggtcatcgatgatgagcggcgcgtacaggccgcggtcgagctgcacgccctggtgggagtggaagaaataggtgcccggatcgggggccacgaactcgtacaggaacttggtgccctgggtgacggcgtcctgggtgaggcccggcacgccgtcggcggcgttgcggatctggatgccatgccagtggatcgtggtgggggccggcaactggttgtccagggtgatgcgcagcaggtcgccggcgctggcgcgcagttcggggccgggcagggtgttgccgtagccccaggtgttgacattgaccccacccaggtcggcggtgaaggccgaggcggtgatggtcctggtgaccacgtgctggccggggctcggggtgagtgcgctgggggtggcgaaggcctgcgagaccgagttggacgggctgttcgccgagcaggcggccagcaaccagctgcccgccactgccatggatcccgccagcacgctgcgtcgagttgccttcatcgtcattcctccccggacggccccgcgcacccggcggggggcttggcgcccgcaccacccatgatggcgccgggccattgaggcggggtcgcgatcacatcgcgattgtatgaaggtcggcgtcgtgtcccgggtgtacgcgggggcagcatgcgtggggggctgggggctgggggctgggggctgggctcgtggggaccgggagccctggaggctagaacaggcgcgtcccgagggcggactgctccaggctgagcagggcctgcttgcgttcgacgccgccggcatagccggtgaggcggccatcggcccccagcacgcggtggcagggcaccacgatgctcaccggattgtgtcccacggcctggccgacgccctgggccaggtgtcggttgcccaattgctcggccaactgcccatagctggtggtggtgccgaacccgacccggcgcaacagggcccagacccgctgctcgaagtcggtgccccgggcggccacgggaaggtcgaactcgcggcgtgtgccggcgaagtattcgccgagctggtcggcggccgcctgcaggaaggggtcggtgccggcgtcacattcggtgcccagctggtcggacgtcggctggtggcgctgcccggtgaaataggcgccacacagggcctggccacccgcgacgccatcgctgaccaggatcatctcgcccagtggggtggccacccgggtgaaccggcgggacgcggcaacgcccgcccggtgggatgcgcctgctgcggtggatgccccgggctggtcgtgtgcaccgagctggtcgggcgcgccgggtgcgggggagacactgggggacgaggcggtcatggtgccattctcgtcgcatccgccgagccctgcgagtcaagggcatgtgattcaagttcaaggagtgcccggcgccgttcaatgccccgggcgcttcccgacaggctcccatcgctgcgcaccacgcggtggcagggcacgatcacgctgatcgggctgcgtgcgatggcggtggccaccccgcgggcgagtccccggttgcccagctgctcggcgatctcgccatagctggccgtggtgccgtagggcacccgggcgaccatcgtccacacatggcgctcgaagtcgctgcccgccggcgacagcggcacggtgaacccgcggcgctccccggcgaagtactcgtccaactgcgtggccaccgaggccagcagcgggtcggagccgggcgtgacctgctcgcccagttggccaactcccagttcctcccccgggtcgacgccgaacagtgcgctcaggccctgcgtgccgccggacgagcgcgccacggccacgagctggccgaagctggtcccgaggcggcagtggcgcagatcggggggtgtgatcatgtgtccattcttcccgggtgcaccagcgccggacgcggcggggcgtcgcacgtggtcccagaggcggcggggcgccgcacgtctgcccggacgcaccagcgcagcatgcgtcccggcgccgcagggacgtgccgaccccccgttggactgccctgtgcacgacctccgggcatggtcggcgacggcccccgcgccgcctaaacttggggccgtgagtccttccagcgatcccgcagcgccagcaggtcccgcagggcggcgtcccgcctacgcccagatgggatcgtcgatcttccccttcatgctggccatcatgtgcgtggtgatcgtgctgtcgggcatcggcgcatcgaagggcgtgcagttcggccccatcatcaccgacggcgccttcttcatcttcccgttcagctacatcctgggcgacgccatcaccgagatctacggcccggtggccgcgcggcgggccatcatcatgggcttcatcgtcaatgcggtgagcgccggcatctactggatcatcatcgtgctgcccgggctgggagacgactactccaatgccaagcaatcggccctcgagctggcgctgggtccggtctggcaggtggtgctggccggcatggtcggcttcgccggagggcagagcgtcaactccctcatcatgtggatcggcaagaagcgccaccaggagaagggcctgtatgcccgcctggccagctcgaccgggctgggtgagctgatcgacaccatcctgttctgcaccatcgccgcgccggtgatcggcctcaccacgctgggccagtgggcgaactacacggtggtcggattcgtgtacaaggtggccctgcagtacctgctgatgcccgtgaccgcccgggtgatccgggtgatcaaggcccacgaacccacctatcagcaggcgcttgccgcccgcgccgacgagcgcccgcacgcgtagccacgcgtcggactcgggggcacttgcctgacccctgggcacccgttcgggcgccatgggcggcgcggcaacccggcgacccggcggcgcggcaacgcggcgatcccgcgctgcccacccgcctcagatcagtcgcgccaccgacgccttgaaggcctccacgctcgcgcgggcgtccacggcggtgaccacgcgggcattggccgggcggtgcagcaactgccggaagtcggcgaccgtggtgccccgcgtcagggcggattccttctcgacgcccacccactgcgggctcatcgtcggatccacctcacccagggcgatctgggcggccagcaggtcgtgcacctgcgccaggtacccgtggccgtggtcggcatggaactcgaagtagaagcgcagcgcatcggtcaccaggttcaccaggggcacgccggtgtccgccgggccgacgtcgcgtgccgaccgggcagtcaggtgtgggggccgtgcgccggccccgatggccagctcgtcgaggtcggcgggggtcagctccaccgtctcggtgacgttcagtccggcgacgatggggagccggtcggcctcgagccccgagaaggcggcatagacctcggcggccgcatgcgggtcgcaccatgcgttccactcggcactcggggtggtgttgcccgggtagttgaaggctccgcccatgatcaccacccgacgggcaagccggggtagttccggctcggcgcgcagtgcgatggccaggttggtcagcggcccggtgaccagcagggtggtctggcctgggtgttcgcgcaactccggcagccacagctcctcgatgccgtgctcgctgaacgggcccgtgatggcctcgggggcggtcgaatatcccaggccgaactcaccgtgggtctccggggtggtggccaccggcacctccagcggcttcgagctgccgaccagcaccggcacgtcatcgcgtcccaccagcgacagcaccgccgccgagttccgcgccgccaggtgcgaggtggtgttgcccgtggtggtggtcacccccacgagctcggcgtcgacatgggcggccaccgccaccagcgccaaggcgtcatcgatccccgtgtccacatcggcgatgatccgcatccgttgcctcccgtgctcactgtgcgcgccccgtggccggcggtccggcgatcagccaccggtcaccgcttgggcgggcgcgctaccgtttctccaaactctatgggacgcgtcgtacgcgcaccgtctcacccgcgcccgcattccggcgggcatgggccggggctccccggggccctggtcagggacgatggccgggcgcatccacgtgccgccgcagcgatgcggccgattcacgggggccggccattgcgggcccgcgccgaatctgatgatcgcccgcgcgatccccgggcccgggtccaccgggttcggaccccacgacgatgccgtcaacccgccggccccacggtcgccatccccgcccggatggaccaccggcaaggggccgtcgggactccaacgagggagaacacccatggcaagcaactaccagctacccgacacctatggcatgtacatcggtggcgagtggcgccaggcgtcggacggcgccaccatcaatgccttcaacccggccaacggcagcgcgctggccaccatccccgacgccacgcagcgtgacgtggatgacgcggtacgcgccgcccgtgcggcgttcctgggctgggccgagaccccggtgcaggcgcgctcccgggcgatgctcgacatcgccgacctcatccaggacaacctggacttcctggccaccgtggaatcgatggacaacggcaagcccatccgcgagacgagcaacgccgacatcccgctgtcggttgaccacttccgctatttcgccggcgtgatgcgtgccgacgagggcgcggccaccatgatcgaccagaacacgctgaacatcatcctgcgcgaaccgctgggcgtcatcggccagatcgtgccgtggaacttcccgttcctgatggccgcctggaagctcgcccccgcactggtgtcgggcaacacggtggtgttcaagccctccagcgccacctcgctgtcggtgctggaactggcccgcctggttgacgaggccggcatcctgccgaccggcgtgttcaatgtgatcaccggttcgggtggcaagtccggcgaatacctgcagcacgccgatgtcgacaagctcgccttcaccggatccaccgaggtgggacgccggatcgcgctcgccgccgccgagaagatcatcccggccaccctcgaactcggcggcaagtccgcctcggtgttcttcgacgacgccgaccccgatgtggcgctgaacggcgtcgagatgggcatcctgttcaaccagggccaggtctgctcggcgggttcgcgcatcttcgtgcagcaatcggtgatggacgacttcatggccaggctcacgaactcgttcgagaacgtgaagatcggcgatccgctcgacccgagcacccagatgggtgcccagatcgacgagcgccagctcgacaagatcctggaatacgtcgacctcggcaagcaggagggagccagcctggcggtcggtggccagcgcgtcaccaccggagacctgggcaagggcgtgttcatggagccgacgctgctggtgggcgacaacgacatgcgcgtggctcgcgaggagatcttcggacccgtcggcgtggtgatccccttcaaggacgaggacgacgtggtgcgcatggccaatgactcgatctacggcctgggcggtggcgtgttctcgaagagcctcgagcgggccatccgcgtggccacccgggtgcgcaccgggcgcatctgggtgaaccagtacaacgcgttcccggccggcgcccccttcggtggctacaagaattccggtatcgggcgcgagacgcacaagatgatcctggatgcctaccagcagacgaagaacatcctggtgaacctgtcgggccagccggtcggcctgccctacaacctgggcgactgatcccggccgcggtgccaccaccggccccgccatgaggcggaccggccatcgtcacccgacggtggccggtccgctgcgtgcggcggccttgtcgccggcggcgccactcccatagcttgggccacacagatcaggaccggggcatcacgaccggggcatcgcgccccggatcatcacgacatgggggagagctggttcatgggacccgtcaggaacatggcaggcgtgcagtgggtggtcgtggtggtgctgctcgcggtgggcgtctaccagctggtcgaggccctgggcaccggggtgggcggcccacgcccggtgtcggcgatcatcgtgatcgtgctggccgggctggccgcactctccctgctgcgcaggcagcgggcccaacggcgctgagccgatcacgggccccgatccccggccgcgatcccgggccccgtcgtccgggtggatgtccgggagggcgaccatcgccgtgcccggggcaggtgaacagttagactcaggtcgtaagagcccgcttgccattcgcaacgggcttgttctctgcccccgcgaacagtcggggcagcgacccgaaatgaggggattcatgccaggcatcgtcgtggtcggcgcccagtggggcgacgagggcaagggcaaggcgacggaccagatcggcgagcaggttgactactgcgtgcgttactccggcggcaacaacgccggacacaccgtggtggccaatggcgacaagttcgtgctgcacctgctcccatccggaatcctcaacaagaactgcacctgtgtcatcggcaacggcgtggtggtcgacctcgacgtgctcgccgaggagctcgacgagctggccaagcgcaatgtgcacgtggcacacccgctgctgagcgccaatgcgcacatcatcacctcctaccaccgcaccctcgaccgcgtgatcgagcggttcgccggttcgcgcaagatcggcaccaccgggcgtggcatcggcccggcctattccgacaaggtgaaccgcatcggcctgcgcctgcaggacctgctctcgcccgactcgctgcgcgagaaggtggtggccagcctcgaccagaagaaccagctgctggtcaagatctacaaccgtcgccccatcgagcccgacgaggtcgtcgatgagctgctcgcccatgccgaggcgctgcgtccctacatcatcgacaccggccgcaagctgaacgacgagctggacgccggcaaggtcgtgttgttcgagggcgcgcaggcgcaccacctcgacatcgaccacggcacctacccctatgtcaccagctccaaccccaccgtcggcggcgcattgaccggcaccggcgtgggacccacgaagatcgaccgggtgatcggcatcgccaaggcctacaccacccgtgtgggcgaggggcccttcccgaccgagctgttcgacgccgacggcgacaagctgcgtgccgacggcggcgaattcggtgccaccaccgggcgtccgcgccgctgtggctggtttgacaccctcgtggtggaggaggccgccaagatcaacggcttcaccgacatcttcctcaccaagctcgacgttctcaccggctgggagaagatccccgtgtgcaccggctacgaggtggacggcgaacgcaccgacgtgtggccgatgaccgaggtggcgctggccaaggccacgccggtctacgaatacctgcccggttggacccaggacatctccgatgtgcgcagcttcgacgagctgcccgccacctgcaaggactatgtgcacttcctcgagcagcgggtgcactgccgtatcagtggcatcggcgtcggcccgagccgcgagcagacgatcatcatcaacgaactggtctgagtcgccggcgccggcaggcccggcgcctgcaagcccaacaccgccaggcccaacaccagacggcccaccgcaggtgggcccaacgccatccggatctgcccggtgcaccctccccgagggcgcaccgggcagatctgtcatgtcgtggaccgcccgattgtccgcattccgggacggcacagcacccgataacgccaattcccgcggccccgccacacccggggtccaccatctgacccccgggtgggcgttatcgaccgtgcgccgtgggcgaacacccgggccccgctgagcgtgatcgcaccgctatcgggcgataacgccccatcgcagtgtgctggacacctgttcgcggcgccccggcacggctactgtttcctcacttcccagccccctggtgggaactgtcgcaaagacgtgactgggctgaaacagccctgaaacaactgattcctaccgtcatagccatcgagttgatcgatacgaaacatcggctggccatccgtcagccctggctccgcacaggaggtcgatatgagcgtgaacgccgttgccgagtccggaaccgcgaaacagaaagggctgcgctccggcgcgctggggctgttgggctcggtcgtggtgggcaccgcctcggtggctccggcctattcgctggccgccagcctcggcctggtcgtggccgccggtgccggcctcaaggccccggccatcatcctgctggccttcctgccgatgttctgtatcgccatggcctacaaggaactgaactccgccgagcccgactgcggcaccaccttcacctggagctcgcgggccttcggcccccgctcgggctggatgggcggctggatgatcatcgcctccgatgtgatcgtgatggcgaacctggccgcgattgccggctcctattccttcgagctcgccaaccaggtgggcctgcacaacaccctgtcgtccagcacgctcgcctcgacgatcgccggcgtcgcctggatcgcgatcatggcctggatctgctaccgcggcatcgagttctccgcaaagatccaatacgtgctgctcggcatcgagctgctgacgctgctcgtcttcgccggcaccgcgctgttccgcgtcttcgcccaccatgcggtgtccaccgcggtacggccctcgctcagctggctgctgcccaccggcatgtcggccggcacgctcgcctcggcgctgctcatcgcggtgttcatctactggggctgggattcggcagtggcctccaatgaggagaccgacgacccgggccgcacgcccggccgcgccgccctgctgtccaccgtgctgctgctgatcacctacctggtggtcacctacgccgccgtcgccttcgccggggtcggcaccgatggcatcgggctgggcaatcccaccaacgccgcggatgtcttcgccgccatcggacccgccctgtacggcgactcgttcatcggccacctgggcatgggcctgctgtcgatctcgatcctcacctcgtcggccctgtccacccagaccacgatcctgccgacggcccgcaccgccctgtcgatggccacccacggcgcgatgccgaagaagttcgccaccatcgccccgaagttcctcacccccacctggtcgacgctgggcatgggcgtgctgtccatcgccttcttcctgggcatgaccgccatcagcccctcgatcctgctggccctgatcggtgccatcggcctgctcatcgcgctctactacggcatgaccggcttcgcctgcgtgtggctgtaccgccgcaccctgaccagctcgccgcgcaacctcatgatgcgcggggtgctgccgatgttcggcggcctgtccctcatggccatgttcggcttcgccctggtgcagtacgccaagcccgactacctggtggacgacgccggcaacaatgtcaccctgttcggcatcggcgcagtggccgtggtgggcatggggacgctcgccgtcggcgccgtgctgatggtgatccagcaactggtcaaccccgcattcttccgcggtgagacgctgcccaagcaggtctggggcggcaccaccagctccttcgtcgagggtccgctggccgtgcctgccgggctcgccgctggggtagcctcagtcgaactggggcccgattccggcgtgccggacagggtcgcggtggtctgagtcgcggcgcccgccacgccagccggcatgacacccggcgagcgggcgggccgacgatcccatgcatatccgacgccaggccggtcggatccttcgttcacaccaaccccagcgccaggccggcggggatgaaggagaaacatgcctatcaacaggcagcgcgtcgccgagctcaccgaggccgagggcgcccaactcaatgcgaacaccacggcgtccaaggccatgtacgccagcgccagccagcacctcgccggcggcgtctcgtcgagctaccagctgcgcgatccgtggccgatctacatcgaccgcggccaccagcagacgatcatcgacgtcgacggcaatgagtacatcgacttccacaacggctacggctcgatggtgcagggccacgccaatcccgcgatcggcgaggccgtcgccgcccgcttcccgctgggcacccacttcggcatggccaccgaggactcctcgatcgtcgcctccgagctcgccgagcggtgggggctggccaagtggcggttcaccaactcgggctccgagtccacgatggacgccatccgcatcgcccgcgcctacaccggccgcgacaccatcatgaagatcttcgggtcgtaccacggccaccacgacgcggtaatggtgagcatcggcgtcgaatacgacaagatcggcccccgcgagcacccggcgtcgttggcctacggcggcggcatcccgcaggccatcgtcgacctgaccatcccggtgcacttcaatgacgccgagacgatggagaagcgcatcgtcgagctggaggccgagggacgcaagccggcctgcgtgatcatggaagccgtcatgatgaacctgggcgtggtgctgcccgagccgggttacctcgaggcggtgcgcgagatcacccgcaagcacggcatcgtactcatcttcgacgaggtgaagaccggcctgacgatcgctgccggcggtgccaccgagcgcttcggggtcaagcccgacctggtgacgctggccaaggcgctgggcggcggcctgccggccggtgccgtgggtggcaccgaggaggtcatgcgcgtggtcgaggaccacaccgtctaccaggtgggcacctactcgggtaacccgctgtcgatggcggcggcgcgcgcctcgctcgagaaggtgctggtgccctcggcctatgagcacctcaaccacctcaacgagcgcctgctcgccggctgccagaacgtgatcgacaagtacggcctgcccggctactcggtgggcatcggcgccaagggttgcgtcaccttctcgcccaccaagatcatcgactacccctcgttcaaggagaaccaggacgtcgagctgtcggagctggcgtggctgtggaacatgaaccgcggcatctacatgacgcccggccgcgaggaggagtggacgctgtcggtgacccatcaggacgccgatgtcgaccgctacatcgaggtcttcgacgagatggccgccgccatcaccaagtagtcgcccaccggcctgcgggcacccgatccacgggtggttgccggccggtccccggcgcacaggatgtgggtcggtccccgcagtgagcggcccgcacagatgccccgcacgagttcgctcgcgcggggcatcctgctgtttgcaggtgtcggggggtgcctcgtccgcccgcaggagcgtccttgagccatcgggactcaaccgcaacccgcccaaatcgggggttcggcttcggaataaccgcaaacgcgttagagttgagtcaggtggactcaatgagggctctggcccgtggaacgaggtcccgggtcgctgaggcccgggggccgcggagccggggaattgcgaagaaggacttatggacacagaaaaactgacaacgatgagccgcgacgccgtcacggctgcggtcaggctggccctcaccaagggcaatccgaccgccgagcccgtgcacctgctgcacgcgatgctcatggtgcccgagagctctgtggcgccgctgctgaaggcagtgggtgccgatgccgcacgcgtcgacggcgccgcctcggcagccatcgacaagctgccgagcagctcgggctcctcggtggcacaaccacaactgtccggcgcgctggccagggtgctggccgatgccgagacgcgtgccgacaagctgggtgaccagttcgtcagcaccgaacacctgctcatcgccctggccgaggtcgattcggacgcgaagaacatcctcgcgtcgaacggcgtcaccacggcggccctggagaaggcattcaacgactcgcgtggtgacaagcgcatcaccagcgccgaatcggagggcggggaatccgcactcgacaagtactcgatcgacctcacccagcgtgccaaggacggcaagctcgatccggtgatcggccgcgactccgagatccgtcgcgtggcgcaggtgctgagccgtcgcaccaagaacaacccggtgctcatcggcgaggctggcgtcggcaagaccgccgtcgtcgagggcctggcccagcgcatcgtcaagggcgatgtgcccgattcgctgaagggacgccgactggtgtcgctcgacctggcgtcgatggtcgccggggcaaagtaccgcggcgagttcgaggaacgcctcaaggccgtgctcaacgagatcaagagcgccgagggccagatcatcaccttcatcgacgagctgcacaccgtggtgggtgccggcgcgtccgagggttcgatggacgcctcgaacatgttgaagccgctgctggcgcgcggtgagttgcgcctgatcggcgcgaccacgctggacgaataccgcgagcacatcgagaaggacccggccctggagcgtcgtttccagcaggtctatgtcggtgagccgtccgtggaggacacggtggccatcctgcgtgggctgcgcgagcgctatgaggcccaccacaaggtgcgcatcaccgactccgcgctggttgccgccgcacagctgtcacatcgctacatcaccggtcgacagctgcctgacaaggccattgacctggtggacgaggccgccagccgcctgcgcatggagatcgactcgagccccgaggagatcgacacgctgcgccgtcaggtggatcgcctgaccatggagcagttcgccgtcgagaaggaggaggaccccggttccaaggcacgcctggcccggatcaactccgacctcgccgacgccaaggagcagctgcggggcctcgaggcccggtgggccgccgagaaggagggcctcaacaaggtcggcgagctgaagacccgcatcgacgcgctgcgcaccgaggccgacaagcacacccgtgacggcgacctggccaaggcaagcgagatcctctacggcgagatccccgagctcaacaagcagctcgacgaggcatctgcggccgaggaggattcgcaggggaagtcgatggtctccgaggaggtcaccagcgacgacatcgccgaggtcgtgtcggcatggaccggcgtgcctgtgggcaagatgctcgagggcgagagcgagaagctgctcgacatggagaaccgcatcggcaagcggttggtgggccagcaggccgccgtcaaggcggtctctgatgcggtgcgtcgttcgcgcgccggcatctccgacccgaatcgtccgaccggttcgttcatgttcctgggccccaccggcgtcggcaagaccgagctggccaaggccctggccgacttcctgttcgacgacgagaccgcgatggtgcgcatcgacatgagcgagtacatggagaagcactccgtctcgcgcctggtcggtgcccctccgggctatgtcggctacgaggagggtggccagctgaccgaggccgtgcggcgtcgtccgtactcggtggtgctgctcgacgagatcgagaaggcccaccccgatgtgttcaacatcctgttgcaggtgcttgacgatggtcgcctgaccgacggccagggacgcacggtggatttccgcaatgtgatcctcatcatgaccagcaacctcggctcgcagttcatggccgatccgagcatgtcgcccgaggagcgtcgcaaccaggtgatggccgtggtcaaggaccacttccgtcccgagttcctcaaccggctcgatgagatcgtgctgttcgacgagctgagtcgcgaggacctcgacaagatcgtcgacatcagcctggacaagctcaatcgtcgcctggcggagcgtcgcatcagcattgacgtgtcggctgccgcgcgcgaatggctcgcccgcaccggctatgacccggtgtacggcgcccgtccgttgcgtcggttgatccagaccacggtggaggaccagctggcccgcgccatgctggccggcaccatcagtgacgaccagaaggtgagcgttgacatgaaccaggccggtgacggcgtggaggtgaagggcgaggaccctgtgtctgcgtgagcactgggtccgcgtgatcactgggtctgcctgaccacttgacgactgacagcatgaggccgcccatcccgggattccggggtgggcggcctcatatgtgcttgctggacgcggtgcccgctatgacgttgtgacggcgtcggtgtcggccgcgtcgcgtgcggcatggtgggcggtggaccagtagctgtacgccgagaaggcgacgaacacgatgatccccagcacggtcgcccaggtggcgaagccgtcgccgacgatggccagtggctcgtccttgccggtggcgcccacgatcgccgcgaagaccacgccgaacaggctctcgccgacgatcagcccggtggccagcaggatgccggaacgcttgatgtgggcggcgtgggctccccgtcgctctgcccagcggtcgaagaagcggccgatgatggcgccgaccgggatcatcacggtgagcgtgatcggaaggtacatgcccatgccgacggccagtggcggcaggtgcagcttgtgggtggtgcgtccgaggatctcgtcgacgatgatcaccccgacgccgatgagagcgcccatgccgatgagcccccagttcagcgagtcgccgaagacgccctgcaccagcgatgagatgagggctgcctgcggcgcggccagcgcattgtcaccggcaccgggggtgcccaggaatccgaacgccgactgcatgagttcgagcaccgggggaatgaccagcgagccgaagaccacgccgatgatgagggccacctgctgcttccacggtgtggcgcccaccagctggccggtcttcaggtcctgcaggttgtcattggcgatggtgcccacggagaacacaacggctgcggtgaacagggtgtacgccaccagtgcggtgccgtgcgtgccatcatgctggccgtaggtggcgctcagcagcactgccgcggcgatggcgacgaggatgccgacgccggagatggggctgttggacgcgccgatgagcccggccatgtaaccgcagacggaggccacgatcagaccgacgagcagcacgaagaccaggctcaccgcgatgaggctccccgcgctgccatcgagcaccgtgccgcgggtgaacccccacagcagcatgccgatcggcaccatggacgccaccaccacgatggcgacgatgttgatcgggatgtcgtgctcggtgatgtccaccttctccccggagtggcggcggcgcgtggagcggatcgcctcgcggatgccggaggtgatcggggcgatgatcttcagcagggtccagacggcggccacggcaatggtgccggcgccgatgaagcgcacatcggtggcgaagatgtcgggaaccgaggctgccaggggcgccggggcaccgcggctcagcatcggcagcaacacgccgtacgagatggccacgccgacgagcatggcgatgccgacggtgattccgaccaggtgtcccacgcccagcagggccagcgagaggctcgtgcccaggatcgtgccgccgcttccgatgtggagcacggtggagaccttggtggccaccaccttgagggcgccgagcagcgagaagccgccggccccgatcgccccggtgaagatggcgcgcaggccgctgcgctgcgaggcggcactctgcgaggagtccccgaccttgagcacctcggccccggcgacgccctcgggatagggcaggtcggaaccggtcaccagggcgcgacgcaggggggatggagtacatgacgccgagcgttccgccgatggcgcagactgcggcggtcgtccagtaggggaagcccgtccaccagccgatcatcaccagaccgggcagcacgaagatgatggccgacagcgtgccggcggcggacgcgatggtctgcacgatgttgttctcgaccacggtgtggttctggaagcgccgcaggatggccatcgagatcacggccgccgggatggaggtggcgaaggtcaggccgaccttcaggccgaggtagacgttggcggcggtgaagatcagggtgatgatgccgcccaggacgacggcccggaccgtcaactcccggattcctccggatgcgtgcgtggtggtgttgccagccattcgttctcctgcggctcttgggaccggtcgcgcccctcccgccgtcggcggcagcgctgctgggcgacggcgcctgtgttgtcgtcccatgaccctattcctgttcgggggtcgacgttcgctgcggggccgatgatctgcgccggggcatgtgtcctgcgccgggccacgtgttcggtgcgggggccggagcccggcaggccacaatggggtcatggcacacaagcaccagggccgggcatcggctgctcatggggaagtcgtaagcggcgcgtccgggccggacggggccgtcgggggcggtgacgccaccccgtcggaccacgacgtgctgcatgtgcagcccgacaagttcgtgccgggcgcattcgtggtcagcggcgggggagtggagcattccttcgtcgacccgaatgatccgacgcacctcgagttcccctatatgcagcgcatcagtgaggccatcgacgtgtgggtgcccgccggtgagcggccgcgggtgatccatgtgggtggtgcgggcatgtcgttggcccgctatgtggccttcacccgtccgacgtcgccgcagatcgtgctcgagcccgatgagcgcctcaccgaggaggtgcgccgtgaactcccgctgccgcagcgctcgggcatcaaggtgcgtccccaggacggacgcaccgggctggccgcgatgccggcggactatgccgacatgatcatcgtggacgcgttcgcccacctgtcggtgcccggcgagctggtgaccggccaggcgttcggcgaatacgaccgcgtgttgcgcgacggcggcctgctggcgatcaatgtcaccgacacggccccgttcacgtggacgcaccgggtgctggccggggcgaatcgctctttcagcgaactgtcggtgtgtgccgagccgggcgtgttcaaggggcgacgcatgggcaatgtggtgatcctgtgctcgcacctggagctgccgatgtcggccctgatgagccgcgggcgcggggacgccttcccctaccgctggatcttcggcgaggagcttgaccgttggcgtggcgcgcccgagcccttcgacgacgccgcgccccagggcagccccgtgagttgggacgcccggacgcacttcgaatgaagttcgaatatgggcacagcgagtgaaactcgaacatgggcccagcgagtgaaactcgtacatgggtccagcgaatggggtcacgccctgcccgcagcgcgtgacgggcggataaccgcgtcccatcggtcgggacctctaggctgaatccatgtcgtcagcccgccgcgcttgccgcccttccgtgttcaccctggtggtggtgggcgtcgtggcgctcgtgctggtgctcggcgcggctgccgcatggcaggtctggggctccacccgctcggcgcacaacagggcggcccgggcgctggcatcgttcccggcgtcctgcgacagccaggccaccgatgccgtgatcggggtgctcaccatcgacgccatcggcgtgcatgagcccatcgcgcgcggcacggacaacaaggcgctcggctccggggtcgggtggtacgccaccacgggccagccggggcaggccggcaactttgcgctggcgggctaccgcatcacccatggcgcgccgctggagcggctgctggaactcaacaagggcgatgtgatcacggtggacagctgctcgggttccttccgctacgcggtggaggtggcgccgcgcgatctcaccgtgcatgccgacgacagctgggtgctcgacgcggtgccgggccatgccggccaggtccccaccgattcgttgttgacgatcaccgccgaccaggacctcgtgccgaccgcggatcgttcggtgttgttcgccacgttggtgcactaggcgccaccgttgccggggtgcccgggccaaccgggcgtgcgggtgccgtgcccgcggccggcccgatattctcagcaccatgaccgatcaagccagcagcgaccgcgaagccctgcgccagcacatcatcaacgaagccgtcgtgcccgggcacgtcgtgctctccagcggcaaggaggccgagtactacatcgacatgcgtcgcgtgacgctgtcgggcgtggacgccccgctggtcggtcgggtgatgctcgacctggtcaaggactgggacttcgacgccgtcggcgggctcacgatgggtgccgatccggtgggtgcggcgatgttgcacgcagcggccgctgccggttcgccggtggatgccttcgtcgtgcgcaaggaggccaagacccacggcctgaacaagcgcatcgagggtcctgacatcaccgggcgtcgcgtcgtggtggtcgaggacaccagcacgaccggcgggtccgccctgaccgcggtggaggccatcaaggaggccggcgccatcgtggtgggcgtcattgacatcgtcgaccgctccggcggcgtggtggcccgggccatggcggacgccggcctggactaccgccacgcctatgacgccgaggacctgggactgtagggagtcggaccgcacgaagtcacaccgtggggagcggcgccgtcagggcccgcgggacccacgggcgcgtccatcgggcgtccccggcgcggcaggtgcgccccggccgggcagcggttggccgtattgctgccggccggactgtcttcgtggcccggtggctccattagtgtggacatgaagcgcatcggctcatccgagtcggggcccgctacgtcacggggcgagggctcctcacggggcctgaccccaaggaaaggcgcgaagctgtgattgccatcatcgtgatcatcgtcgtcctgctggcgatcgtggggggcatgttcatcgccccgtacaactcgctggtggggctgcgcaacaagctgcaggaggcctggcgccaggtcgacgtggaactcaaccgtcgctatgacctgattcccaacctggtcgaatcggtcaagggctacgccacccacgagcacaacacgttgtccgacatcatttcgctgcgcaaccaggcgcgccagatggataccaacggtgcggcgagcgcccagcgtggccaggtggaggcccagctcacccaggccctgggcagcatcaatgcgctggccgaggcctatcccgacctgaaggccgacgccggcttccgccagctgtcggagcagttggccgccaccgaggaccgcatcgccaactcgcggcgctactacaacgcggtggtcggcgactacaacacgaaggtggagagcttcccgtcgaacatcagcgcctcgatgttccacttcaccaaggctgcctacttccaggtggacgacccctcgatgcgcgaggcgccccaggtggacttctcacagatgggctacggctcgggtgtgcagcgcgatggccagcaggccggcgcgccggctcccgggaaccagcagtcggccccgcagccggcgctgggccaggacgcgcccggccagccgttggtcacgccgccggcgcagcccggcaccggacagccccaggcggttcccaccgagcagaaccagggatatgtgccgccgcagccgccgcgtcagcagccgacaacgggccagcagccgacgctcccggacgatgactcgcagggtggttcgggctccggagcatccggccagaacggctagccgccggtcgccgggcacccacccggcccgcggagctgtgcctgtcagtagtgaccgtgtccggggacagcgataggggcggatgaagcaccatctacggtgcttcatccgcccctatccgtcgccttgcgatctgttgcgccgcgatccctcactccgtggtggcacgcgcccgacgggccccatggcgcggggatgacccccgatcaggcgtcggcgccggccgccgcttccatgcgtccgcgacgcttctccaacaggtattcgaccaccatcgggatcaccgagatgagcacgatggccaccagcaccaggtcgatgttgtcgccgatgaaggccacattgcccaggaaatagcccagtgcggtgacgccccacacccacagcacgccgcccaccgccgtccacaggatgaagtggcggaaggtcatcccggccgcgccggcgaccatcgtcacgaaggtgcggacgaagggtacgaagcgtcccagcacgagggccttggagccgtaacgggcgaagaacttgtgggtgtcgtccaggtgcttctggctgaagatcttgcccacccagccgtcgcggggtttgaacaaccagcccgagacgaacttgccgatgtaatagccggccatgttcccgcccaccgcgaagacggtcatgatgaggcaggccaccacgtagaccatcggcttgcccatgtcgccgaaggtgatcgacgggggcaccatggcgatgaacatgcccaccgtgaacagcagggagtcaccgggcaggatcgggaagatcgcgcactcgatgaacaggatggcgcacaccccccacagggccccgttccccagtgcgtggatgatggtcgccgggtccatccagctcggcagcatgggcaccagcgcgggcaacaaagacagtgggagcacccggcaagggtagcgttgggcggcgtggatcacccagctgacagccctgcaccgcagtctgacgcaaccctgtccgaggcccgggacggtggcactgccaagccgccggtggaccccaccgccccgacggtgggcgtcggcccggctccccaaccctggcccgacgatccgcgcttcgaccccgagctgctggccgacggcgaccaccgcaatgtgctcgaccgctaccgctactggacggtggaggcgatcgtggccgacctcgacacccgacgccacagcctgcagatcgccatccagaactgggagcacgacttcaacatcggctcgatcgtgcgcaccggcaatgcgttcaacgtgtcgggggtgcacatcctgggacgccatcgctggaaccgacgcggcgccatggtgaccgaccgctacctgcacgtgcaccaccagcccgatgtcgcctcgctggtgtcctactgcgccgagcacgagctgaccatggtgggcgtcgacaacctgcccggggcggtgcgcctggagaccaccgagctcccgctgcgttgctgcctggtcttcggcagcgaggggcagggcctcaccgacgagctcgccgccgcctgcgaacgcctggtggcgatcacccagtacggatccacccggtcgatgaacgccggtgccgccgccgccatcgcgatgtaccactgggcgctcgcccatgcgggtgggccgcgtgacgagggggtcaccacggcggtgtccgatgcgtcgtcgttgccagcccacgcaaagcccggctctataggatgagcgccatgcagcccacggccacccagcgtccggcgaatccacgcccggtcagcgaccggggcttcgcgctgttgctcagccccgaccgactgcagctgcgccacgccgcgttcaagaagtccaccaggcgtgccgtcatcttcgcggtgatcggctcgatcttcggggtcggctggctgctggtggcgctcaccatgttcaagtggcagctgcatccggccgggatcctggcgctcaggccgtcggccctggcgatggcgttgttgctgctgtggccgctggtgtcgggttgggtgcaggtggcacgcatcgcgatgacgcgccacgacctcacccgcgcactggggcgcatgcaggtgggggcggcggtgacgatgcgtcgcgacggcctgctgctcacccacgccgatcgcgtcgagttcctggcctggtccgatgtctcggccgtgcgcggcgcaagcagacgggcggtgcccggacccgaactgcaggtggtgcgcgccgacggcagctactggacggtgcccttcgccctgctcacgttgatgcccggcacgatcgactcgggcctgtgggcatattcgggacgccggctgcacctcgacatgagccgctgcgagcaggtctggtgatcccggacgcacctgcgcccgccgtacccgaatttgttggaatgttcttacaattggattgagctcagggctttcggaactgctccgatcctgagagaattgcgctggtgcccgccgcgtcggcaggcatcccagctgttggaagaacacaacgagggtccccccgatcgcgcgttccaccacccggatgcgcagactgaaccggcgtcgagccagaaagaagcacacatgcctatcgcaagtcccgaggtctacgcggacatgatcgaccgtgccaagaagggcggcttcgcctacccggcgatcaacatcacctcgtcgcagaccctcaacgctgccatccagggcttcgcggaagcgcagtccgacggcatcatccaggtgtccaccggcggcgcggagtatgcgtcgggccagaaggtgaagaacatggtcaccggtgccgtggcgctcgcggagtacgcgcgcgtggtggccaagcactattcggtgaacatcgccctgcacaccgaccactgccagaaggagaagctcgacacctacgtcaacccgctcatcgcgatcagccaggagcgcgtcgaccgcggcgaggatccgctgttcaactcccacatgtgggacggctcggccatcgacctgggtgagaacctcgagatcgccaaggagctcctcacgcgcacctcgaaggcccacatcatcctcgagatcgaggtgggcgccgtgggtggcgaggaggacggcgtcaccggtgagatcaacgacaagctctacaccaccgtcgaggacggcatgcgcacgctggaggccctgggcaccggcgagcagggtcgctacatcaccgcactcaccttcggcaatgtgcacggcgcctacaagcccggccacgtgaagctgcgccccgagatcctcaaggagatccaggacgcctgtggcaagaagtacggcatcgacaagcccttcgacctggtcttccacggtggctcgggctcgagcccccaggagatcgccgatgcggtgtcctacggcgtcatcaagatgaacgttgacaccgacacgcagtacgccttcacccgccccgtggtcgatcacatgttcacccagtacgagggtgtgctgaagatcgacggcgaggtcggcaacaagaagatgtacgacccgcgctcgtggggcaagaaggccgagaacggcatggccgaccgcgtggtggaggcctgcaaggagctcggttcgctgggcacccacaaggactgatcacccgctgatcgcacggaggcccccaggggccgtcggacgaccgtgaacccggggccgcgtcggatacaccatccggcgcggccccggtccgtcctgcggggaggacgccatttgggttcctgacgtttctcccgtacactggactttgtccggtcattaaacacgacctgacaaagtcccgaaacacacattggcgtgcgtgacgctgctgatgtggcgttcgcgcgcctgcttacagaaaggcgtcgacatgaacgacacacttcagaacaaccagctcaggaccaccacccccaccaccacgagcagctcggccgcgatccgttccgccgaggctgccgacgtcaacgccatcacgttgtcggttgcgctgggtgccgtggccattgccgtgatcgccctcatggtgatcggcgtgctcaccaccaacaccctgctgcttgccggcggcggtgtgctgatggttgccgcatccatggtcggcgtctacgccggcgtgaacatcgcggctgcaaggactctctgagtcagcgggacagcagcgggccacggcccgcagttctcccagggggagcgtgtcaacgacgcccacgtgaacccatagaagaagcgccggtcatcggggaccggcgcttctttctgtccgggggccatggtgccaggcctccggtgcgtccgggcgatcagctcggatgcccagttgttggatgcccagcgtgttggacgcacggggtatcggatacacagcgtgttggatgcccggcgtgcgtgcccacggcatggtcgaccaaccggtggccgaccacgccgctcagagcgggcacatcacagtgacatgtccaccacgccacggccctggatgccgccatgggccagcagctcgtagccctcgttggcctgctccagggtgaaccggcggctcaccacgtccttgtagtcgatgatgccgcgcgaggccatgtcgatcaccgcaggcaggtcctggcgggtgcgggcgccgtaggagcccaggatcgactggctgcgacgcaccgtgcggttgatctccacgccggcggtctgcacgccgccgcccagtccgatcggcaccatgcggccaccgtcggcgatcacgtcgagcgcggtctgccaggttgcggggatgccgagcgcctcgaaggcgacgtccacgccacggccaccggtgagcttgagcacctcctcgcggggatcgtgggtggtggagttgatggtggcggtggcgccgtagccggccatcggggccagcttctcgtcggagacgtcgatggcgatcacctggcgggcgcccatggcgtgggcgacctgcacgatgttggtacccaccccgccgacggccaccacggcgacggtctcgccgtagcgcaggtcggcgccacgacgcaccgcgccgtagccggtcagtgccgcgcagcccaggatcgccgagggcaccgtgtcgatattggccggcaccggcgccacggcggtggaggggatcaccgcgtactcggccagcccacccatcgaatacatcgccaggggctcaccgtcggtggtgaacagccgcgtctcgccgtcgtacagctcgcccttgaggcgattcatgttgaagaagttgaggcacagctcgtcgtggccgcgcgcacactcggcgcacttgccacacggcatgaggaatgcgccggcggcctgctggcccacctgtaggtcggtgaactcattgcccggcccgagctcgacgatggtgccggccacctcatggccgagcaccgccggggtggggaaggcgatggcgccgctgatcacgtgcaggtcggagtggcacagtccgcaggccgcgaccttcagcaggatctcgccctccttggggtgcggcgtacggatggtctcgaccttcaggcccgcaccgggctcgcgaagcaccgctgcgcgcattgtggccgggatctcgaaggtggtgagggactgggtcatgtccacggctttctgtctcaggggaatcagggcattcagcattgattgcccgcgtagtcacacgctatcaagacggttgccaattgtcaggacataaacacaattggaggacgcatccccgggcctaggccgtgcggtgcagggcctgcggcagggcggccgtgagcacgatgagcacgacgatctccaccaacgtggccaccatggccgtcgtggcgggccccctggtcgccaacagggcggccggcgcggtgaggcagatcacccgggccgcggcggccagcacatgggtcgaggtggtgtgtgcccgcacgagccacggcggcaccagcggctccacagatccccgggccgccggggtcaccaacacgaactgcgccaccgccagggccggggtggcgaccagcaccagcacgagcgccccgccgccgtggacatgggtggccaaggtcatcagggacagtcccaccagtgccagcgccaggccggcgatcaggcgggcaaagccgaatccgcggaagcggtgcaccgcggtggtcaccccgacgcccgtcgccgtcaggcccagcaccaacagtgcgacggtggcggcccggggcgaggcgagttcgcccgccaccgcgggcaccagcaccagtgctgccagaccgaggggcgcctcgcgcaccagggcgagcacggcgccggcggcgacggtgcgcttcatgccgggcagcctgaggtcgcgccaccgcaggcggcgttcctcggcggccatgtcgcgggccatcagcacccagtcgagctcgatgctggcctccagggtgccgaacagccgcaccatcgccgcatagctgcgctccatcgtgcgatgcgtcgccagccacaccggtgactcgggcagggtggccagcaggatgcccaccagcagtgccagggccccgatggtgggccacaccagtcgctcgaccggcagttcgacggccaccgcggccaccgccacgagctgggtggtgcccagccccaggggcagcccgaagccggtgctgcccgccacctggtgccgcgagttggcggccagctcccgggccagcaggggagcgacgatcgtgagtacgccggcacccagcccggccagggccgggccgagcaggccgggccagtggatgggggcggcgagcggcgtcagcacgccaccggccaccacgagcagcgccgcggccactccctggagccgtcggccgaccaggcgggcactcagataggccacgatgacgccgagcagcgctgcgcccgagaccgtggccacccgcagcacggcgccccggggagccgccaccagggtggcgcacaggccaccgtagacggcaccggtcagtgcgccggcgagcgcgatcgtcacgcgaatgcgtgccacgcgcacctggcctgagcccatcagatgcctcctcgggaagatgccgacctcgactgtgccaaccctgcaaccgtgtcagggctgcgaccgtgcgaaccctgcgaccgcgtcagggctgcgactgtgccaagactgtcatgaaagcagggagccggccgcgggatcctgacagatcacacgaccggctccgcgcggggcaacactcagctgtagtccttctggaacttcagctcgagttcctcgaggctgtggtacttcgtctcggggacgatcttcaggtagaagaacagcgtgcacacattgaatgccgcgaagatgatgtaggtcagcgcaccgccgaagcccttcatcatcatcgggaacacccaggcgacgatcgcgttgacgatccacagcgtgcccacggcgatgcccagcgcggtgccgcggatcttcatcgggaagatctccgagaacaacacccagttcaccgtgccggactgcttggcgaagacgaacaggcagaccaggatcaacacgagcatcggagcgaagctcggggcgccgacgatggtgccgtcggactgctggtgcggctggatgaagaagaagaacaccgcggccagcgaggtgaggaagaacacgatcatcgccgactggtagatgcccacatggcggcgggcgaacttggcgatcaaccagaacccgacgccggagccgatcagtgacacggcaccggagaccacgttgaggctgatcgagtcggtcatcgagaagccggccgcgtgcagcaccttcggcatgtagtacatggctgtgttgatgccggtcagctggtcggcgatgcccaggcccatgccgatgagcaacaggcgccgcgtccacttggtcgaccagatctgcgagaagttccagcgttcctgcttggcctcggcgcggtgcacctcgaccatctcgtcgatctcatgcgccacatcgtccttgccgtcctcacggacgcgcttgagggcgccgatggcctcggggatgcgcatgtgcgaggcgtaccaacgggccgactcgggcatggcacggatgccgaagaacagggcaatggccgggatggatgccagcacgagcatgtagcgccaggtcatgccgttgccgccggagacggtcaggccgacgatgttctgcagcacgtcccacacctgggtactgcccgaggcgtaggtgcccgacgggtcattcgagacgatggcctcggggccaccgtggtactgcgccagcaccgcattcatcgagtatgcgagcagctggccaccgacgatcatgaactggtcgacggccaccaggatgccgcggatgcgctttggtgcggtctccgacaggaagaccggcacggtggcggacgcgccgcccacggcgaagccgagcaccaggcggaaggcgaacagcatccacacattcagtgacagggtgcagccgatggcgccgatgaagaagacgatcgccagcatgatgatgttgtggcggcgtccgtacttgtcggacaggcgtccgccgacgctcgcgccgacggctgcgccgatgcacaacagggcaccgaccaggccctcctcccaggtcttcagggcgaggccgccggcctcggagggaaggtacatatagggcagtgcaccggcgatcacaccggtgtcatagccgaagagtagtgaaccaagtgttgctactgccgcgatcgcccccagcgaccgcttcttgccggaggccggtatctcggccaccagctccttgatcttcgtcggtgtgtacgtccccaccgacgccgtgttctcgctcatcgagactccttgcgcctgcggcccgccctcgttggcagagccgtttgatcgggcatcagcactggtgcccgaccacagcaagcactttatagtcctgaagcccgaattgtcattacatccggacaaaaattgacccagaggtcttctctctcccacgtcggccggagggggcccggggacgcgttcggcgccccgggttgagtgtgctgtcatcgcacagcgacgtcaagcctgccgggggtgcactgggcgcccacgccgggcctgccggagacacgtcaggcccccaccgaacgaactcagtgggggcctgacgtggtgttgccttcttgctggtgttgcgttcttgctggtgttgcgtggtgctggttatgcgttggtcgggaagttcattcccacatggccgacgtggtcaccctggctgggccagcggctggtgatcaccttgcccttggtgtagaacttcacgccctccgggccgtggatgtgggtgtcgcccagcagcgactccttccaaccaccgaaggagtagtaggcaaccggcaccgggatcggcacgttgatgccgatcatgccggcctgtgcgtccagcgagaactcgcgggcagcctcacccgacgaggtgaagatggccgagccattgccgaacggggcggagttgaccagctcgatggcctcctcgtaggtgtcggcatgcacgatcgccagcacgggcccgaaggtctcctcgcagtagatcggcaggttggtcggcacatcgtcgaggatggtcggggcaagccagaagccgtccttctccgcggggttgtccggggtgtagccacgcccgtcgagcaccaccttggcgcccgccttctcggcctcgtcgatccaggaggtgatccgctcctgcgcggcgcgggtgatcaccggacccatctcggcatccgggttggtgcccgcatcggtgacgatcttggtggcgcgtgccttgagggcggggatcagcttgtcctccacgccaccgacggtcacgatcaccggcagtgccatgcagcgctcgccggcggcaccgaaggcgcccgacgagatgtgctgcgcggcgaactccacgtcggcgtcaggcatgacgatggcgtggttgttggccccgcccagtgcctgcacgcgcttgccgtgctccacgccggtgttctgcacgatgtgggccaccgggctggaaccgacgaacgagatggcgtcgacgccgggatgctcgcagatcgccgagacgatctggcggttgcccggcaccacgttgaacaggccgtcgggaaggccggcctccttgtacagctccgcgatgaacagcgaggccgtcggcaccgggctggccggcttcaggatgaaggcattgccggtcgccagggcgatcgggtgcatccacatcggcaccatcaccgggaagttgaacggcgcgatgccggccacgatgcccacgggctggcgcaccgtgtgcacatcgacgccgcgcgaggcgttgtaggtgaactcgcccttgagcgcggcattgatgccacaggcgaagtcgatggtctcgcggccacgggcgatctcgcccagtgcgtcgccgtgggtcttgccaccctcggccacgatgatgtcggccagctcgtcctggcgatccaggatgagctgacgcatcttgaacatcaccgagacgcgcgtggccagtgaggcattggcccactcggcctgggccttcttggccgacgcgatcgcggtgtcgaggtcatcggagttcgccagacgcagctggccgatggccttgccggtggcgggatcgtcgatatcgatgaggtcgccgtgcccctgcacggacttgccgtcaatccacagactggtggcttcactcatggctgttcctttcattcttcttctgcattctgcttcccggagccccgggacggggtcctgcggaaaagggcgcgcgggggtctccattgccccgggttgcgcgcccggtgttgcttcctcccgcaggctgcgacggttgggtcccagcctgcagttcgcgacgaccttgcgatcgtcgccatgagccggtggcagccgtcctggccaccacgatcagccgatgagggctgacgtgctcacaatccggccacgggggccggtggtcctacaggtagtggcgctgggggcgccgatcctgttcgtactgcacgcgggcctgctgcgtggactccaggcgcgaggtctccgagaccaccacgtcccaccagctcgagccgggcgggttggggccgtacaggtcggtctcgatgtggatcatcgtcgcgcgatcggaggcgtgggcctgctcataggcagcccggaactcctcgatcgtgtgcacctcgagcacctcgatgccccacgagcgggcatttgccgcgatgtccacgccgaccacgtgctcggtgtcgtccaggtggcttccctcgccgcgctcgcggtacttcgtgccgaagcgctgggagccgtgcgactccgacagcgagccgatcgagctgtagccgtagttgtccagcagcacgtagatcaccttgatgtgctcctgggtcaccgtcgccagctcggcgggcagcatctggtaggtgccgtcaccgacgatcgagaccacctcggactccgggcgggcgagcttgacgcccatggccgccggaatctcgtagcccatggtcgagaacgcgtactccacgtggtactgcgtgggcgtcttggcctgccacagtgcctggaggtcgccgggcatcgagccggccgcattgatcacgatgtcctcggggcccatcagctcgttgagcgcgccgaagacctccgtctgggcgggcagcggctggtggtccaggtggtagcaacgctgcgtgacctcgaaccaggccttgcgctcggcatggatctcgtcggtgtacgcatcgtccacgtggtagtcggccagctggtcgatcagcgccagcagcgtctcgcgggcatcggccaccaccatctcggccgattccttggcggcgtcgaaggagcgcacgttgacgttgacgaacttcacgtcggggttcttgaactgggtcttggaggccgtggtgaaatcggaatagcgggtgccgatgccgatgatgaggtcggccttgtcggccaggtggttggcggcgtcgcagccggtcgatcccacaccgcccaccgaggcggggttctcgaagctgatggcgcccttgccggcctgggtgtcggccaccgggatgccggtattggtcgccagctcgcgcagctcctgggacgcctcggagtagatggtgccgccgccgctgatcaccagcggacgcttggcagcccggatcagcgccacggcgcggtcgagcgcagcgggttcgggcaccggacggcgcacatgccacacgcgcttgcggaagaactccaccggccagtcgaaggcctcggcctgcacgtcctggggcatggcaacggtcaccgcgccggtctcggccgggtcggtgagcacccgcatcgcattgagcagcgaggggatcagctgctcgggacggttgatgcggtcgaagaagcgcgacaccggacggaagcagtcattgaccgtcacgtccagggtggtggggtcctccagctgctgcagcaccgggtcggggatgcggttggcgaactggtcggaggggaagagcagcacggggatgcgattggtggtggccagcgcggcgccggtcaccatgttgagcgagcccgggccgatcgaggcggtgcacatcatcgtctgcaggcggttcttggtgcgggcgtaggccacggcggcatgcacctggccctgctcgttgcggggcatgatgtagggcatcgcgccctcgccctcgtcacggtcgatctcgttctgcaacagcgcctggccgatgccggcgacattgccgtggccgaagatgccgaatgcgcccgcgatgagccgttgttcgacgccatcacgctctgagtactggttggtcaggaaacggatcgtcgcctgagccgtggtgagccggatcgtcgcggagtatgcctcgttgctcacgtcgtgccttctttcagtgtcagtgacctggggcgggagcccagtgctttcagtaacggggagggccccggtgttcttggagacagggggatgcggtggtcagtgcgccattggaagccggggatcgatcgcctcgtgttcccaggtgtcacgaatccagtggtagtgcggatcatcggtggacatccacaccaggtcctcggcaggtccggccatcacattgaggtagtagaggtcgtaaccgggagcggccacggtgggcccatgatatccgtgcgggatgagcacgacatcgccggagtgcacctccttggtcagctcgatcggacgatcgggggtgccataggtgcggtggaaggcaaagccctcgccggtgggtccctgggcgatctcgaagtagtagatctcctcgagctcacgctcgtcggcagtggtctcgtcgtgcttgtgcgccggatacgacgaccagttaccgccgggggtcagcacctcgcagcacagcaggtgggaggtctccacgccattggccagcgcatagttgttcacctggcgcgagcagtcaccggcaccgcgcaggtcgacgcgcaccttgtcgcggccgtagtactgcgtcggcagggcccgtgaggcccgcgcgctgggcagcgcgaaacggccaccgtccttcgaggtgatggtcggcgcctcgttgcggccgacatagaggaagtcggtgatctcggcgaaggcgccgctgcgtccgtcgaggtggtagtccttgccgtccaccgtgacatcgcaggaacccgacagcggcagcaccaggatctcgtcgggtccggtggccagttcctgcttctcgccgggggcgaggttgagcaccttgaggcccgaggatccccaaccggcgcgctcgggggagatgtccaccgagaagtcgccgtggccggaggagttggccgctacgtagatgtcttcgttgttgtcactcatgcaagcagacctaccgtttcgtcgacagccgccgcaacatcgtcgccgggcgggaagaggagggaccgtccgatcaccagtcccttgacagtgggcagggccaacgccctgcgccaggactcgcgggccttcgccggatcggagttcaccgcgccaccgaggatgagcgcgggcaggctcgaggcctccatcacctgttccatgttgtccaccgcgggcagcttcagccaggtgtaggccgacgtgcggcccaggcccgaggcgatcgtcatggaggtcatcacggcctcgggtgacaattcgttgaccacgcgcccgtcgtcccagcgggacacgaacggctccaccatggccatcaccctggcctcggcgagctcgtcgacggccttggcgcaccaggccagcgtggcggcggtggcgtcgtcggaatagttgatgcgcagcagcatcttgccgccgtcgaggtgcgaggccaccacgccgcgggcgtcgtagccggtgcgtcggtcgtccatctcgaaggaggcgccggccaggccgccgcggttcatcgacccgaagacgagcttgccgtccagggcgcccagcagggccaggtcctcgatgatgtcggccgtgccgaggaagccattgacgccgggacgcgacagcgcggtgacgcagcgctgcagtatctcctcgcgcgaggccatcgccgtggggctgccaccggccgacagcgcgccgcgggcggggtggtcacaggcgatgatcatcagcttctcgtcgccggcgggcatcgtgccgcggggacgatcagtcaggcgctcggcgatgcgctcgggatggtgcatgcgcacgtcgacgatccgggacagcaaggacatcctcagacctcttccagttcgggcgccacggagtcatggttgtcgcgcatcacggccagcagctcgggctcggtgggcatcgcggtggagcattcgatgcgcgagctcacgatggctccggcggtggatgcggcgaagatgatcttctccaggggccagccctcgagcagtccgtggcacacggcgccgccgaaggcatcgccggcgcccaggccgttcttcgtctccaccggggtgatgggcatctcgacgcgctcgttgcgggtcttcgccagcgtgccctgcaggccctgcttgacgatcgccagctcgacgccggcatccagcagggcatccgcggcgcgctcgggatcggtctcgccgaccgcgacctcgcactcctcgcggttgccgatggccacgctcaccttgggcaggatgcgggccacctgttcgtgggcggcctgcgggctgctccagaactgcgagcggtagtcgaggtcggcaatcgtgatgccgcggcgatcgcgggcgtccagcgccacgtggtgggtgctgcgcgagggctcctcgctcaggccggtgaccgagatccagaagatcgccgagtccttgaccgcctccaggggcaggtcgtcggggcgcagctgcaggtcgggggccgaaggctggcggtagaagtacagcgggaagttgtcgggcgggaagatctcacagaaggtgaccggggtcttgaggctctccgaggtcaccacgaagtcgtcgtagacgcccaggcggcgcatctcctggcgcaggaagcgaccgaagccgtcgtcgccgacgccggtgatcactgcggaggagtgcttgtagcgggcggcggccacggccacgttcgtggggctgccgcccaggaacttgccgaaggtttccacgtcctccaggccacgaccgatctcgagcggatagatgtccactccgatgcgtccgatcgtgaggacttccacggagggggttctggaggtggccacggcgttgatccttcccgtctttgggtgacaacttgagcgatgttccggccgcgggatcggtggtcgatcggggcccggatgcgtcgtggaacaactgtcgcacgaaggtctggcgaggtcaactatttgtcatgacaaagtatcaactgacgctcatggcgtattgttggcttgtcatcacggtcatggacgaccgtcgtggcacccacgtgcaaccacccgatgtcgcgctcccggcgcgacacatgtattggatcgaggggagccccacccatggccgctcgcacagacgtctatgtgcccaaggtcagccttgaccgttccagccccgtgccattgtatttccagatctccgagcccatcagcaagctcatcctcgatggcgcgctcgagccgggcaccaggcttgaggacgagctgtcgatggccaagcggctggcggtctcgcgtcccactgcccgcaaggcgttgcagcgcctcgtggacgggggattggtggtgcgccgtcggggcgtgggcactgcggtggcacccacccaggtgcatcgtccggtggaactgaccagcctcaatgccgacctcgcccaggcgggacaccaccccaccacgcgcgtgctggactatgtcacccgcggcgccacggaggacgaggccgaatggctgtcggtgccgaccggcaccgagatcgtgtcgatccggcggctgcgcaatgccgacggtgagccgatcgcgctgctgacgaacctggtgccggcccgcatcgcccccaccagtgaggaactggagaccggcggcctctacgacctgctacgcaagcgcgagatccacctgtcgacggcccatcagtccatcggtgcgcgcaatgccaccaaggccgacgccgaggtgctgctggaaccccgtggcgcagcgctgctgaccatgacgcgcaccacctacgacgacaagggcgaggtggtggaggtgggtcgccatgcctaccgcgcctcgcgctacagcttcgattcgacgctgttcacccgctgaccgcatccggtgcgcagggcccggggagggcccgtctgcgtggctggttccttgcatcaggtgagcttcctcatgttgtcctgacaaatagttgacatgacatgcgggtcgaaggttcaatggacctcgttggttcgccccaccgtcgaagacgacgcggatggcaccggcgaccacactgaggaaggaaaccatgagcatcgaatacacgcccgggcccctgctcgaggctgcccgcaatacccccaccgcgctgtggaacgactcggccgatcccgatgagctgcgccagtcgatctccttcggcggcgtgggcgccacctgcaacccgtcgatcgcctacacctgcatcaccaagcgcaaggacaagtggctgccgcgcatcgccgagatcgccgaggagatgccgcaggcctccgagtccgagatcggctggcaggccgtcaaggagctctcgctggaggctgccgcactgctcgagcccatcttcgagcgtgagaacggacgcgacggccgactgtcgatccagaccgatccccgccttgcccgcagcgccaaggcgctggccgaccaggccgaggaattcagcaagctcaccaagaacatcatcgtgaagatcccggccaccgaggtcggcatcgcagcgatcgaggacgccacctatcgcggcgtctcggtcaatgtcaccgtctcgttcaccgtgccgcaggcaatcaccgccggcgaggccatcgagcgcggcctgaagcgccgcgaggccgagggcaaggacacctccacgatgggccccgtggtcaccctcatgggtggacgcctggacgactggatcaagatcgtcgccaagcgcgacggcttgttccttgatcccggccacctcgaatggggcggcgttgcagccctgaagcgggcctaccacgagttccaggcccgcggactgcgcgcccgggtgctctcggccgccttccgcaatgtcatgcactggtcggagctggtgggtggcgacctggtcgtctcgccgccgttcgcctggcaggagatcatcaacaagtcggactacaagccggtcaaccgcatcgacgagccggtggccctcgagatcatgaagacgctgcagtcgatccccgagttcgtgcgcgcctacgagcccgacggcctcacgccggccgagttcgacgccttcggcgccacccgccgcacgctgcgtggcttcctgcaggccgacgccgacctcgacgagctcgtgcgcaatgtgatcatgccccagccgtgatccggcgcctgtcggggcacccggcacacaactccatgacgcacaacagcacagcttgaccaagaacaccgcttgatcgagaacacagcttgacccacaacttcacagcaggaaccgcaggggcggagccgtggtgccggctccgcccatcggccccggccctcctgcggaccgcaccggcagtcatccacccggatggctgcccgcacgacggggcacgccgtcccgtcgtccaccaaggtctcccctccacagaggtctacccgttcgatttcatccacttcattccgcttgtgcgggaaaggcagcaacgatgctgagaatcgccgtcatcggcgctggccgaatcggccacgtccacgccaagaccattgcctcccatccggacgccacattggaactcgtctgtgacccggtcggcgatgccgccgagaagctggccgcgctctacggtgcccgtgccgccaagcagaccgacgacatcttcaccgacccgaacatcgacgcggtgatcatcggttcacccaccccgctgcacattccgcacctgctcgccgccgcgaaggccggcaaggccgtgctctgcgagaagccgatcgccctcgacatggctgacgtcaccgccgtcgagtccgagctggacgccatcaccacgccggtgatgttcggcttcaaccgtcgcttcgacccctcgttcgccgcgatccacaaggccgtcggtgacggcaaggtcgggcgcctggagcagctgaccatcatcagtcgcgatccggcggccccgccgatcgagtacatcaaggtctccggcggcatcttccgcgatatgaccatccacgacttcgacatggcgcgcttcttcctgggcgacatcaccgaggtcttcgcggccggccaggtgctggatcccgccatcggcgcggccggcgacttcgacgccgccgtggtcaccctgaaggctgcctccggtgcggtggccaccatcatcaacaaccggcactgcgcctcgggctacgaccagcgcctggaggctgccggcgacgagggtgccctgttcgccgagaacatccgccccaccacggtgcgcttctcgtcggccacccagaccgacgcccaggatccctacctggacttcttcctggagcgctacgccgacgcctaccgcctcgagctgtcggccttcatcgaggccgtcgagaacggcacgaagccgccgacgggcatcgacgatgccatcaaggcgctgcgcctggccgaggctgccaccgactcggcgcgcagcggcaagccggtcaccctggcctgaccgggccatgccggcaccattggcctgatcgggccaggccggcaacactggtcatcagcgaccaatacggccattggcgtcggaaccctgctgttccggcgccaatggcgtcccaacggcgtcccggcatctctggaggatccatgaacgaacccgaccggccacaacggccctcactggccttcttcaccaggctgttcgggcagtcgttcatcgtggtctggggcgccttctggctgttcgccctgttcagcctcatcagctggagccctgccctggagcactactgctccggcgtggcgggctgtcgcagtggcctcaccgaggtcgccctggtgggcgtgatcagctcgctgctgggcatggcggtctgcttcttcacgcgtcaccgcacggcgtactcgccggcccggcatgcctccctgccctggctggtgctggccgtggtggcggcggtcaccgtgggctcggtgcccatcctgatgccctgaaacccagcaggggtcctttcaacctgacatagctttgtcaggacaaattaggttatgatcggtacgagtcctgacggcgggcccctcgccgccgccagcgagacaacgaacgtcccacgaccgaaacaagccgcggatccaccatcgcgtgatccgcccactcaggaggaaccgatggcaaagaagctgtccccagacaccgcgatcaaggaccccaacggcctcacctggggcatgcacccgatcagctggcgcaacgacgacatccccgaggtgggggagtggaacacgctcgagatcctgctcgacgacctcgtgacgctcggcttcgccggcaccgagtgcgccggcttcttccccagccccgaggtgctgaagaaggagatcgacgcccgcgacgagaagatcgccgcccagtggttctcgtcgttcatcctgcgcgacggcgtggaggccgtggcgaaggacttcgagcagacctgcgccaacctcgaatatgtcaacgccccgcgcgtggtggtctccgagcagaccggttcggtgcagggcatccgcgatgtgtcgatcttctccaacaagccggtgatgagcgaggccgagtggacccagctcgccaggggcctggaagtgctcggcgacatcgcccacaggcacaacatggagctcgtctaccaccaccacctgggcaccgtggtgatgaccgccgacgagaccaagcggctcatggacatgaccgatccgagcaaggtctcgttgctgttcgacaccggccacgcctacgtcggcgacggctcggtgatggcgatcctcgagcagaacatcgaccgcatcaagcacgtgcacttcaaggacgtgcgtccgcgcaagctggccgagtccaaggccgccgagcgctccttcctcgactccttcctggccggcatgttcaccgtgcccggtgacggcatcatcgacttcccgacggtctaccgctacctgatcgaccacggctaccagggctggatcctggtggaggccgagcaggaccccgagatcgccaagccgctgatgtacggcaggatggcccgcgactacatcgagaaggaactgttcgcctgacccggttgcccgaccccgctcgctggggccccacagcccgggcgccgggcgacgacccccgtaccgagctgttacagcggcttccccgaccgaccgggggagccgctgtggcgcgttcggggacggcgtgcgcccgtggtccgcggttgcgctcccggagaggtgctggcgggaggacggccccggcgacgaccaccagacgggactcgcccgccccgcaccgccgcggggccctagattcaccgtgtgctcacccttgccacgggcctggcgacatcgctcgggctgatcgccgccatcggcgcccagaacgcgtgggtgttgcgccagggcatccgccgccagcacatcggggtgatcgtggcgctgtgcattgccagcgacatggcgttgatcagcgtcggcacgctcggcatgggtgccctggtgacgtcggcgccctgggtgatcaccgcattcacctgggccggtgccgcctacctgtgctggttcgcctggcgcagcttccgctccgccctgcgtccccagtccgacgacgcgctcaccggtcagggcccggacgccggggccctgcgtccgatcgtgggcaccacgctggcactcacctggctcaacccgcacgtctacctggacacgatggtgatgctcggcggcttggccaaccaacatcccgggctcacccgctgggccttcgccggcggggccatgctcggctcggcgctgtggttcgccgccctcggcctcggtgcccgcgccctgtcccgcccgctgtcgaagccctcggtgtggcgcgtgatcgacgccgccatcggcgtgatgatgctcgccatcgccgccaggctcctcctcggctgattcgacaagagggtaggggcctgcggggcggcgtatgtggcccgcgggaagtgtttctgccgcaaaaggggaggggtctgcgaggcggcgcagtccgtaagcttctcaggacaagcgtctcgcagacccctccccggagccggtcgggtgtctcgcagacccctccccgggccgatcaggtatccccgcagggatctgttccgtcacacgaaaagggtgcgggccgtcgaggcggcgcagtccgtaagattttcaggacaagcgtctcgacggcccacacccgtgccgagccattgtgcggacacaaggtccgtcacgtggagagcatcacaactgccgacgtgcagcacccttgtcagcactctgcgccagcagcgcgaacaccttcagcgcattgctcaccggacgcacgcggttctcgggcacccaacccttggcctcacgcactgcacggcgcctggcgagttcatcgtcactcacctcgacgttgatcgtgcggttcgggatgtcgatcgagatgatgtcgccgttctcgaccaggccgatgttgccacccgaggccgcctcggggctcatgtgcccgatcgacaggcccgaggagccgccggagaagcgaccatcggtgatcaacgcgcacttggggccgagccccacgcccttcaggtagctggtggggtagagcatctcctgcatgcccgggccgcccttggggccctcgtagcgcacgaccaccacgtcgccggccttgatccgcttgctcaggatggcctcgacggcctcctcctggctctcggtgatcgcggccggaccacggaagacgtactggttctcgggcacgccggcggtcttgacgacgcagccgtccacggcgatgttgccgtgcagcacggccaggccaccgtcggtggtgtaggcatgctccaccgagcggatgcagccgttcacctcatcggtgtcgagctcgtcataggtcttggtggaggtgaacatctcggtggtgcgcacaccaccgggggccgccttgtacagctcgaaggcctcgggcttcgccttgccgccgcgcacgtcccaatcgtccaggaagccctgcagcgacgcatggtgcaccgaatgcacctcgtcgtggagcagcccggcgcggttgagctcgcccaggatcgccgggatgccaccggcacggtgcacatcctccaggaagtactgcgagctgttcggggccaccttgcagatgcagggcacccggcgggacagctcgtcgatgtcctcctgggtgaagtcgacctcgccctcctgggcggcggccagcaggtggaggatcgtattggtcgatccgcccattgcgatgtccatcgtcatcgcattcgcgaaggcatcgcgcgtggcgatcgcgcgcggcagcaccgactcgtcgtcgccgtcgtagtagcgcttggccagctccaccaccagcgcgccggcctgctcgaacagcggcttgcgggcggcataggtggccagcgtcgtgccatttccgggcagtgacaggccgatcgcctcggtgaggcagttcatcgaattggcggtgaacatgcctgaacacgagccacacgtggggcaggccgacatctcgatgcgcttcagttcgtcgtcggacaccgacgggtcggccgaggcggtcatcgcgtcgatcaggtcgaggcgggtggtgtcggtgccgtcgtcgcgcttgacgggacgacccgactccatgccgccgccggagacgaacacggtggggatgttgagccgcagcgcggccagcatcatgccgggggtgatcttgtcgcagttcgagatgcacaccagcgcgtcggcctggtgggcattgcacatgtattccaccgagtcggcgatcacctcgcggctgggcagggaatagagcatgccgccatggcccatcgcgatgccgtcgtcgacggcgatggtgttgaactccttggccacgccaccggcggcctcaatggccttcttgacgatggatccgacgttcttgaggcccacatggccgggcacgaagtcggtatagctgttcgcaatcgccacgatcggcttgccgaagtcgttctcggtcatacccgtggcaagccacagggcacgggcgcccgccatggggcgtccctcgtaggtggtttttgagcgcagtttcggcatgggagtcctttcgcgtaatgcaggccccaatgtattgcggcccgcaaggcgccacggacggtcccacggctcgacccctcggcggcaggccgagcgggtcgggcccgcccggccggcgctgccggtgcgcggctagaggcgcacggggtattgcgggtgcggaacctcgggcgtgaccgtgccggccacgaagatgtcgaaccacagcatgaacaccagcacggtccagatctggcgcgagtggtcggccacgccgtcgcggtgctcgtcgagcagcttcatgacggcctgcgggttgatgtactcgtcggtgggcgagttgaggatgatgtcgcgcgcccaggcgtacgaatcgccgcgcaggtacacacgggtgggcaccgggaagccgagcttgcggcggtgcagcacatggggcggaacgacccgctcgagggccttgcgcagggcgtacttggtggtgccgtccgccagcttctcgctgaggggaatgtggcgggccacctcgaacacctccttgtcgaggaagggcacgcgcagttcgagcgaattggccatcgtcatcttgtcggccttcaccaggatgtcgccgcgtagccaggtgaacaggtcgatgtcctgcatccgctgcaccggatcccagcccttcgactgggcgtagatcgggtcggtgacatcgtggaacgagatattggggtcgtaggtgcgcagcaggccgggcagctgctcctcgcggaagatgcgcgcattgccgtagtagcggtcctccatgtcgagggtgccgcggcgcagcatgtccttgccgcgcatcccgtcgggcagggcgcgtcccaccgcggccaggccgcggcgcagcaggtgggggagtcgttccagcggacgcaggctcaggggctcgtggtagatcgtgtagccaccgaacagctcgtcggcaccctcgcccgacagcaccaccttcacccgcttgcgggcctcattggccacgaagtagagcggcaccagggccggatcggccaccggatcgtccaggtaccagacgatcaacggcagggtcttggtcatctcctcctcggtgacccagcgggtgatgtgctccacgccgatcgcccgggccgattcgtcggccacgtcgacctccgaatagccgtccaccttgaagccggtggtgaaggtgagcaggtcggggttgtagcgcttggccagcgcggcgatcgcggtggagtcgatgccgcccgacaggaaggcgcccaccgtgacgtcggcacgcatgtgcttggccaccgagtcgtcgagcacctcgaggatgcggtcgtagaggtcgcgctgctcgcgggtgttgttcaccgggatcgactggaagtcaggatggaaatagcgggtctgggtgagctcgccgttcgtcagggtgaacgagcagcccgactcgatcttggacaggtcctggtccatgctggccggctcgggcacgtactgcagcaccaggtagtgctgcagctcgggcacgttcacctgtgcggtgccggtgagtgcgcgcagcgacttggcctccgagccgaagacatagccgtcgtcgaccttcgccatgtacatgggcttgatgccgaacgggtcgcgggcaccgaaggcgacgtcctcctgggagtcccagatcacgaacgagaacatgccgcgcagctcgttgacccactcggccccgtggtagtggtagccggccacgatcgactcgccgtcaccctcggtgtggaacacggcgccatcctcggcggccaggcgttcgcgcagctcgaggtagttgtagacctcgccgttgaacaccatccagtagcggtcgggggtctcgggcgggccccacttcagcggctgccccgagttgtcgatgtcgatgatcgacaaccggttgaagccgaagcaggtgtgctcgtcgtgccagatgttggtgtcatcggggccccggtgccggcactgcttcatcccctcgcgcacctggtcaacgcgctcgtcgcgcaggctttcggtggagatgaagctcatgtaaccgcacatgggggcccaacttcctgaagattgttcatcaacggcgtacccgttcagtattgccgatcgggtgaaacgtccgacgcacgtcgcacgcctgaaatcggcggtgcaacgcgtcccggcgctcgtggctgcccgcccgcgggagcatagccaaccgacgagcgtgtttggagacagccgttctcggcgaattgcgggttagcatgcgggggtgcgtatccatctcgtcggcgtcgactatcttacggcgccactgacagcccttgcctcgctggcgccggctgacgagctggccctcacggtcatgggacgcgaacccggcatcgccggggccgccctgctgtccacgtgcaaccgctatgagctgatcgtcgatgccaccgatgccgtggaccccgaccgtctgctcgggctggccaaggccggaatccgcgagctcgcccccgatgtcgatccccgtgcgctggccggactggaggtgcgcagcgacgacaccgccatctgccacctgttcgaggtgggcgccggactgtgttccgccgtggtcggcgacaagcaggtggccggccagttgcgccgtgcctatgagctggcctccgaccggggccagtgcaccgcgcgcctgcaccggctcttccacgactgcctgcgcgtctcgcgcacggtcgcctcgtccacctcgctgggtgcggtgggacgctccgccgccggcgtcggactcgacctggccatggggcgtggcggcctgcggggcgcgcgcgtgctgctgatgggcaccggatcattcgcccgtgtggtggtcgccgagctcaccgaccgacgggtcggcgagatcgagtgctggtcggcatcgggacgcgccgaggaattcgccgcacaccatccggtgacgccggtgtcgtccgatggcctggaccgggcactgcaatcggccgacctggtgatcacctgctcgggcaacggggtggtgctcagtggcaccacgctgtcggccgcacgcccggaactggcgcgcaacgccgaccggcaactgtcggtgatcgacctctcgctgggcggcgatgtcgacgaggccgccgccgaactgcccggcgtgcacctggtgcgactcgacgatgtcagctcgcgcaccgcacagctgcagtccgccgtgatcgaggaggcacaacgcgtggtcacccagggtgtcgccgcccatctgtccaaggaacgcgccagggccgccgatccgctcgtcacggcgctgcgccagcatgcgaaggtgctcgtcgacgatgaactggcacgcgtgcgcgagaacgagtcacccgaggtggtgcaggccgtcgaacggtcgctgcgccacgccatcggcgtcatgatgcacacccccacggtgcgcttctcgcagcttgccgaggagggcaagctcgaggactgcaggaccgccctggacgtgctgttcggtgtcgaggtggaagcgtgagccagaccccgcagggcgcctcgggtgatcgccgcgtgctgaagatcggcactcggggttcgcggctggcgcgctcgcagagcgccatgacagccgccctcattgaacaggtcaccgggctgcccaccgaactggtgatcgtgcgcaccgacggcgacgacctgtcgatcccgctgtcggcgccgccgcgcccgggggccttcgtcgcccgcctgcgtgatgtgctgctcgacggcgaagtcgacatcgccgtgcattccttcaaggacctgcccttcgcgcccatgcccgggctgtcggtggtggccgtgccgcagcgcgccgccgccttcgacgccctggtgagccgcgacgcactgggcctcgacgagctgccggccggatcgaaggtcggcacgtccagcccgcggcgcgccagcgcgctgctgcgctaccgcgacgacctggagatcgtgcccatcaggggcaatgtcgatacccgcatccgcaaggtgcgcgagggacgcgtcgacgccgccgtgctcgccgccgccggcctggagcggctcggcctgcacgacgagatcaccgagctgatcgacccgaaggtgatcgtgcccgccccggcgcagggcgccctcgccgtcgagatgcgcaccgatgatccgttggccgccaccgtcgcgcagatcaacgaccacgacacgcgcatccaggtggccgccgagcgccaggtgctcaccggcgtgcaggccacctgcaccaccgccatcggagcccacagcgtgctgcagggctattccctgacgctgatggccgacctcaccgatcacatgggcgtcgcccatgcccatgtcgcccgcaccatcggcctgcgccggggtgacccgaccgacgacgcccgggcgcttggggaaagtgtcgccgaacagcttctggagcgcccatgacagtccgccccctcctgctcatccgtcccgacggcaatgagcgggacgccatcgcgctcgatcgcttcggccttgcctcgacgatcgatccctggctcgaggtgcgtgccgccgacgattccgcgccggcccaccggatgacgggcttcctgcaatcgagcggggcccaggtgatcctgctgatcacctcgccgcgcacctggcagcactgggcgcagcaggtgggcgtcgcggcgctggagaatgcggccgtcggcgcggtcgaccgcggcatgcgcgtgttctgcaccgggcccgcaacccgcgattcgctgcctgccaagctcgccggggtcgcacagatggcacccaatgccgccgagctggcccggctggtcaacggccgggaactgccccgcatcaccggggaccccgacaacgccggcctgccgccggtggcactgatcccgggcagcaccatcgcccgcaaggagctccccgaggcgctggaacgtgccggctggcacgtgctgcgctcggccatctaccagacccatccggtggcccggcgccccgagagcgccgagctgttggcgtccggtgcgttcagcgccgtcgtgctgcgttcacccagtgccgtgcaggccctggccgagttcaccgggggcacgccgattccggcgtccactgcggtgatcaccgccggacccaccaccagcgccgccgcccgcgaggccggattcaccgtgcaggcctgtccctcggcccatccgcaggaggtggccgccctggccgcccgcctgctcggcggccgggcactgtcgcaggagatctaccccgaagcgctgcccgccgaccatcccagccactccggcgccatcgccgacagtgcgctgctgagcgcctgccgtggcgagcgtccggcccgcaccccggtgtggttcatgcgccaggccgggcgatcgctgcccgagtaccgggccgcccgcgagggcaccacgatgctggaatcgtgcctggacccggccctggccgccgagctcaccctgcagccggtgcgtcgctacggcgtggatgcggcgatcttctattccgacatcatggtgccgctcaagctggccggcgtcgacgtcgagatcgaaccgggcgtgggtcccgtgctggcccatccggtgcgcagccgtgacgacatcgccgcgctgccgacgctcaccgacgaggccctggccccgatccgcgaggcgatcggacgggtgaccgcccagctgcccgatgtgccactgatcggcttcgccggcgccccgttcacggttgcgtcctatctggtggagggtcgtcccaatcgcacccatccgcgcacccatgagctcatgcatgacgacccgcaggcgtgggaggcgctgctcgagtgggtggccgaggtcgacattgccttcctgcgcgcccaggtgctggccggcgccagtgccgtgcagctgttcgactcctgggtcggcgagttgtcgctggccgactacctggtgcacgtgcagcccgcatccggacgcgttctgcgtgccctgggcgagctcggcgtgccccgcatccacttcggcaccggcaccggccacctgctggtggcgatgcgcgacgccggagccgacgtcatgggcgtgggtgccgacctgacgctggacgccgccaacgagctgctcggcggacgcaccccgctgcagggcaacatcgacccggccgtgctggccggcccgcccgaggcggtcgacgccgcggtggcagcagtgctggccgccggacgcgccgcgcccgcccacatcgtcaatctggcacatggcgtgcccaaggacaccaaccccgatgtgctggcgcacatcgtcgacctggtccatgaggcgcccgcagctgcgaaaggacactgatatgtcacatcccgccggaatcggttccgtcaagcccgtcaactgggcctacgaccgcgcaccgatgatcatctactgggagctgaccactgcctgtggcctggcgtgccggcattgtcgcgcgacggcccagcccgatccggcacccggcgagctgaccaccgacgaggcactcggcgtgctcgacgagttcgccggcttcggctccccggcaccccatgtgatcttcaccggcggcgacccgatgcgtcgcggcgacctcgaccagctcatcgccgccgcgaaccagcgcgggctcggcgtctcgctggccccggccgtcaccccgctgctgtcggcccagcgactcaaggacctcaaggcgctggacgtgcaggccatctcgttgagcctcgacggctccacggccgcccaccacgacggcatccgccaggtgccgggcaccttcgacgccaccatgacagcgctggccgacgcgaacgcggccggtgtgcccgtgcagatcaacaccctggtcaccgacgagaccgccaaggacctcgacgatgtctacgaactgctcaagaactacgacgtcatgcagtggagcctgttcttcctcatctcggtgggacgcggtgcccagctgcgcgagctcacccccggtgacgccgagcgcaccctcatcaagtggggcaggatcggacgcacctcgccgttccgcatcaagaccaccgaggccatgcagtaccgccgcatcaatgcgcaggccatgatgcatgccggcaagacccgcgaggacgtggagaacagcccggcggcccgtggcttcggcatccgcgacgggaacggcatcgtgttcatctcgcacctgggcgaggtcatgccctcgggcttcctgccgctgtcggtgggcaatgtcaaggaccgcagcatcgtggagctctaccgcgacaccgagctgatgcgccagctgcgccgtcccgaggagttcaagggacgctgcggtgtctgcgaattcgaccgttggtgcggcggctcgcgggcccgtgcctatgcctggaccggcgacccgctcgcctccgacccgctgtgcccctatgtgcctgagaagatgcgcgaacacgatctgagtgttgcctgaccaatgagcaccaccgatcgtgtgaccacccccaccccgaccgtttccggcaccgacgcgcccggccctgatgcctcgcactgccacctggtggtggtcggcggcggcatcaccggcctggccgctgcctggcagggcatggcccgcggcgcgcgggtcagcgttgtggagtccgatgaccacttcggcggcaaggtcgtcaccgaccggcgcgacggcttcctggtggagcaggggcccgactcgttcgtcgcctaccggcccgccgcactgaagttgatcgaggagctgggcctgtccgaccaggtgatcgcaccgggtgggggacgccgtgtgagcctgctgtcgcgcggcaagctgcgtccgatgccggccggcatgggcatggtgctgccgacccgcatgtggcccttcgtcaccaccaccgtgctgtcatggcccgacaagatccgcgccgggctcgacctggtgatcccgcgccgcctgcccgaccatgacgtggcgatcggcgccttcctgcgccaacgcctgggtgatggcatcgtgcgtcgcttcgccgatccgatggtcggcggcatctacggtgccggtatcgacgagctgagcctcgacgccgtgctgccgagcctgcgtgacaacgagcgcgaccaccgctccctgatggtcgcctcccttgccggcggacgcgccagccggcgcgcggcccggcagcgggcggcccagaacaacgcgcagcagaacagctcgcaccagaacagcacaggccagaacaactcagcggggacacgcggcccggccgcatcccccttccgcacgttgcgcgggggcctcggccagctgatcgatgccctggtcgaccagctgcgtgccggtggcgtcgagctgctggtgaacaccagcgtcgacctgctgggccgcgacggggtgcacctgtccgatgggcgggtgctgcccgcccatgcggtggtacttgccgggggagtggccagctcggcgcggttgctgcgaccccagctgccggccgccgcccgtgccctggcgcagatccccctggcctccacgacgatcgtctcgctggcctggccggtcagcgccttcgacgtcgcccctgattcgcagggttggctcgaggccgacgccggcccggtcagtggcctgaccgccagctccatcaagttcgccggccgcgcccccgacggttcggtgctgatgcgcgtcttcgtccccgacaagcgcggcccgctcaccgacgcccccgacgacgagctgctcagcgcggtgatcgaccatgtgcgccccctgctgggcgtgcacggcgagcccggcctcacccagatcacccgctggcacaaggtgatgcccaagtacaccgtgggacacctggagcgcgctgcggtggtcgattccacgctggccgagcagcgtcccacctgggcggttgccgggagtgccctgcacggcgtcgggctgcccgactgcatcagcgacgcccggcacagcgccgacgaggtgatcgacgccgcactggccgctaccccgagcgcacccaccggcaacgccgccaccgaccggacggagacccgatgacgagcttcgacgccctactggtcgctggtttcggcggtcccgaatcgatggcggaggtgcccgatttcctgcaacgggtcagcggcgggcacatcccgcccgaccggctggccgaggtggagcaccactacgcgcgcttcggcggcgtcagtccggtgaacgcccagcaccgcgccctggccgcggccctcggggaggcgctggtggcacggggcatcgacgtgccgatcgccaacgccaaccgccactcgatgccctacatggaccaggccctggccgacctgcagtcccgtggcatccgtcgggtgctgacgctggtgcccacgccctacgcgtcctactccggatgccgtgcctatcgcgaggagctgcttgccggcacccggctcgacgacgagggtcgccccgccctgcaggtggtcaagctcgacccctatgccgacctgccggcgctggtcaccgcgcaggtacagctgttgcgcgcggctctggccgaccatcccgacgcccacctggtgttcaccacccactccatccccaccgccatggccgagacctcgggtccgcacggcaacgcctacatcccgcaacacctggcgctgatcgacgcggtgatggccgagctggccgccggcggcctgcgtccgtcctgggagctggcctaccaatcgcggtccggcagcccacgcacgccgtggctggagcctgacatcaatgacgtgatcacccgcctggccggcgagggggtccgcgacgtgatctgctcaccgatcggattcctcaccgaccacatggaggtggtctgggacctcgacaccgaggctgccgcgacggctgccgagcactccatggccttcacccgggtggccaccgtcggcaccctgccggtcttcatcgaggggctggccgacctggtcgtcgctgccctggccaccgagccgggcaccggccccgacgcccctgccgcgcgccattggtgcacgccggactgctgtcccaatgcccgggtcgccggcaggccgacgatccccgggttcgccgcgggtccacggtgacgcgtcccgcgggcagccccgcccacgccatctccccaagcacccaggccatccagcacccatctcctcaagcacccatctcctcaagcacccgggctcgcccagtcgggcacattcaccctctgacaaggacagataatggctgatatctccatcgatccaatcgtccagcgtccccgccgcctgcgccgcacgcccgccatccgccgcatggtcgccgagacccggctcgacccggccgacctcgtgctgccgatgttcgccgtggaggggctcactgagccccgcgagatcgccaccatgcccggcgtgtggcagcacaccaaggaatcgctgcagaaggccgtgcacgacgcggccgatgccggcgtcggtgcggtgatgctgttcggcaccccgctggagcgcgatccgatcggctcccaggcatggaacccgcacggcatcctcgccaacgcggtgcgctgggccgtcgaggccgagccggaactgccggtgatcgccgatgtctgcctcgacgagttcaccgaccacggacactgcggcgtgctcgcgcccgacgggaccgtcgacaacgacgccaccctgcccctgtacgcgaagatgagcgtcgtgctggccgacgccggcgcggccatgctgggcccctcgggcatgatggacggccagatcgccgtgatccgcaaggccctggacgatgccggccacaccgacaccgtgttgatggcctattcggccaagtacgcctcgggcttcttcgggcccttccgtgaggccgtcgacagccagctgaagggtgaccgacgcgcctaccagcaggacccggccaacgccatcgagtccctgcgcgagatcgagctcgacctcgagcagggcgccgacttcgtgatggtgaagccggccatggcctatctcgacgtgttggcggcggcccgggccatctccaatgtgccggtggccgcctatgtggtctcgggggagtactcgatgatcgagttcgccgccagggcgggcgccctggaccgcaagcgctgcatcatggaggcactcaccagcgtcaagcgcgccggcgcctccacgatcgtcacctactgggccaccgaggtcgccacctggctcaacgaggtgcgttcctgatccgacgccgccggcgcgtggcggcggtctagtcgccggcagccacgatggccggttgtcggctcgccggggtggcgtccgtgcgctcggccgtgggtcgttcgtccggcgcgaggaacagcgcggcgacggcagccgccagggtcatggcgatcgtccaccagaaggccgcatcgaacccgtcccggggacgcgcggtgctcgctcgtgaggtgagcgccaccgccaccagggccgtgccgaaggcgccacccagctgttgcacgatgcgggtgatcgccgaggcatgtggcatgtgctcacgggcgatgtccacataggccccggtcatgatcgggatgagcaccacgcccatgccgaagccccgcacgaacagcaccgtgccgagcagccacagcccggtgtcggtgcctgccagggcgaaggggacggtcgcggcggcgctgatcagcaggcctgccaccgcggtgaggcgcgggccgaagcgggcgaccagggagctcacgatgaaccgcgacagcagggaaccgatgccctgcgggatcaacagcagcgcggcgttgagggcgtcgtagccgcgcaacgactggaagtacagcggcaacaggaagttggccgagaacagggtggcgcccaccagcgtcagggtgaccgaggagacgcgcaccgagcgcaccgccaacaggcgcacgtcgatcagggcccggctgccgctcggcgcgcccaggcgacgaatccggccagcagcgccaggcccaccaatgccggaaccagcacgtcggcgcgatggaagccgcccacgtcgtaggcattggacaggccgtagagcatgccggccagggccagcgacaacagcaccgcgccgaccaggtcgagtcgtgggtggcctgctgccgggcgcggacggtcatcggtgatgaacgccatggcgagtacccaccccacaacgccgatcggcacattgatcaggaacagccagtgccaggacagccagttgagcacgacgccgccgagtacgggcccgatgatcggccccagggcgatcggcaggctcacattggccatggcccgggtcatcccacgtcggtcgacgtgttgcatcaccagggtctgcatgagcgggaacatgatgccgcccccgaagccctgcagcacccggaaggcgatgagcgaggcggcgctccagctcagcgcgcacagggcggagctcaccgtgaacagtccgagcgcgaacagccacagccgcttgcccccgaaccgggtctgggcccaactgacgagggggatcgccaccgcgagcgccagcaggtagccggtgctcacccattgcagcgtcgagaccggtgcgtgcagcgcctcggtgagggtgtgcatgccgatcgcgacgatcgtcgtgtccatgatcgccgtgatcccgccgaccaccagcgcgaccagcaacctgccggtcgactgcgtcgtggccgcaccatcgtgtggattcaccaccatgacctccaatagagaacgaatgcgtacacaacataggcgcgtaagatagtgaacgcaagcgatcacaatgagtacttttcggggttggttttcgggatggggggagtcgtggcggacgcggacgggcaggggacgatcccccgggagaccaggcggcgcggcccggcgctggagaaggcgatcctggacgccggatggcgcgaactcgccggtgccggctacgccggactcaccttcgaggcagtggccgagcgcgcccacaccggcaaggccgccctctaccggcgctggcccaacaaggagtcgctggtgctggccgtgctgtcgcagcgctacttcaatgccccggcaacggttcccgacaccggatcgctgcgtggcgatgtgctggccgtgctgcgcggcgcgaatcgcctcggcgacgatgcgccggccctgatcagcgtgttgctgggggcctacttcgatgagacgaacaccacgccccaggagttgcgtgcccatttgctgggcgatcgggtggacacgatggcgctgctcgtggagcgtgccatcgctcgcggtgaggtcgccgcgccgctgccccgacgcgtgctggcgctgccgatggacctggtgcgcctgcagttcttcatgaccttccagagcgtgccggacgaggacatcgtggacatcgtggacacggtcttcctgccgctggccacggggacgacgcgcgccggggacgctgggggagccgggggcccggaccacaccggaggcgccccggatccggcccgcgcctgggcgaccggtcgtcgggccggccccgctgcgggcagaccctagaatcgaggggcaaggccatcccgctgccggaatgcccggcccgacaaggaagaacccatgagtgtcagtgacgaattgttcgcagaagccctcaaggtcatgcccgggggcgtctcctcgccggtgcgcgcctaccgcagtgtcgggggcacgccacgcttcgtgaagcgggcgctgggttcccacatcgtcgacgtcgacgacaagcgctatgtcgacctggtgtgcagctgggggccgatgatcgccggccacgcccaccccgaggtggtggccgccgtgcagcaggccgttgccgattccacctcgttcggcgcgcccagtgaggtggagctgcggctcgcccaggccgtcgtcgcccgcatgggcggcgccatcgacaaggtgcgcttcacctgttcgggcaccgaggccgtgatgaccgcggcccgactggcgcgcggcatcaccaagcgaccgctgctggtcaagttcgtcggctgctaccacggccattccgattccttcctggtggcggccggctccggggtggcaagcctgggcctgcccgattcgcccggcgtacccaaggaggtcgccggcgacaccgtcgccctgccctatgggcgcatcgacctggtcgaggagctgttcgccgagcgcggcgaccaggtggcggccatcgtcaccgagggcgtcccggcgaacatgggcgtcatcgtgccgcccgagggcttcaaccgtcgcctgcatgacatcgcccacgcccacggcgcccttctcatccaggacgaggtgctcaccggtttccggctgagccccaccggtgcctgggggctgcagggggcgaaggagggctggactcccgacctgttcaccttcggcaaggtgatcggtggcggcatgccactggcggccgtgggtggttcggcgcagctgatggactacctggcccccgaggggcccgtctaccaggcgggcaccctgtcgggtaacccggctgcctgcgcggcggggctggccaccctcgccctcatggacgacgctgcctactcccgactggacgccaccgccgaccgggtctcggcgatggccgatgaggccctggagtccgccggggtgccccaccgcatcaacaaggtctccaacctgttcagcgtcttcctcaccgacgccccggtgacggacttcgcctcggcgtccaagcaggacaccaaggcgttctcgcgcttcttccacgcggcactcgatgccggcctgtggctggcccccagcggcttcgaggcctggttctgctccacggccctggatgatgatgaccttgaggtcatcgacgccggcctgcacaaggctgcacaggcggccgcccagggcctttcctcgttggaggatgtgcgccgctgatcggtgtctcgccaggcggtggcaattgcggagtgggcgcgtttccggcttgttcgccggacgcgcccactgccatgtccgaaactgttcaaatggtgatcacggcgtgttcgtaatgcgagattgcctgtcattttccggcggcgccgaaggttttttggtaggtcgtctggggtgcctcggatgaacgctgttagattcctgtgatctgcgtttagtgcccccacccccttgcccgaatcgccgcagaacgtgggaggatggcgccatgagtccgcgagaaattgaggtttccgagccgcgcgaggttggtatcaccgagctcgtgctgcgcgatgcccatcagagcctgatggccacacgaatggcaatggaagacatggtcggcgcctgtgcagacattgatgctgccgggtactggtcagtggagtgttggggtggtgccacgtatgactcgtgtatccgcttcctcaacgaggatccttgggagcgtctgcgcacgttccgcaagctgatgcccaacagccgtctccagatgctgctgcgtggccagaacctgctgggttaccgccactacaacgacgaggtcgtcgatcgcttcgtcgacaagtccgctgagaacggcatggacgtgttccgtgtcttcgacgccatgaatgatccccgcaacatggcgcacgccatggctgccgtcaagaaggccggcaagcacgcgcagggcaccatttgctacacgatcagcccggtccacaccgttgagggctatgtcaagcttgctggtcagctgcttgacatgggtgctgattccatcgccctgaaggacatggccgccctgctcaagccgcagccggcctacgacatcatcaaggccatcaaggacacctacggccagaagacgcagatcaacctgcactgccactccaccacgggtgtcaccgaggtctccctcatgaaggccatcgaggccggcgtcgacgtcgtcgacaccgccatctcgtccatgtcgctcggcccgggccacaaccccaccgagtcggtcgccgagatgctcgagggcaccgggtacaccaccaaccttgactacgatcgcctgcacaagatccgcgatcacttcaaggccatccgcccgaagtacaagaagttcgagtcgaagacgcttgtcgacacctcgatcttcaagtcgcagatccccggcggcatgctctccaacatggagtcgcagctgcgcgcccagggcgccgaggacaagatggacgaggtcatggccgaggttccgcgcgtccgcaaggccgccggcttcccgcccctggtcaccccgtccagccagatcgtcggcacgcaggccgtgttcaacgtgatgatgggcgagtacaagaggatgaccggcgagttcgccgacatcatgctcggctactacggcgccagcccggccgatcgcgatccgaaggtggtcaagttggccgaggagcagtccggcaagaagccgatcacccagcgcccggccgatctgctgccccccgagtgggagaagcagtccaaggaggccgcgacgctcaagggcttcaacggcaccgacgaggacgtgctcacctatgcactgttcccgcaggtcgctccggtcttcttcgagcatcgcgccgagggcccgcacagcgtggctctcaccgatgcccagctgaaggccgaggccgagggcgacgagaagtcgctcgccgtggccggtcccgtcacctacaacgtgaacgtgggcggaaccgtccgcgaagtcaccgttcagcaggcgtgaggatgattgccaatcatggctgaaaacaacaatttgaagctcgccagcaccatggaaggtcgcgtggagcagctcgcagagcagcgccaggtgatcgaagccggtggcggcgaacgtcgcgtcgagaagcaacattcccagggtaagcagaccgctcgtgagcgcctgaacaacctgctcgatccccattcgttcgacgaggtcggcgctttccgcaagcaccgcaccacgttgttcggcatggacaaggccgtcgtcccggcagatggcgtggtcaccggccgtggcaccatccttggtcgtcccgtgcacgccgcgtcccaggacttcacggtcatgggtggttcggctggcgagacgcagtccacgaaggtcgtcgagacgatggaacaggcgctgctcaccggcacgcccttcctgttcttctacgattcgggcggcgcccggatccaggagggcatcgactcgctgagcggttacggcaagatgttcttcgccaacgtgaagctgtcgggcgtcgtgccgcagatcgccatcattgccggcccctgtgccggtggcgcctcgtattcgccggcactgactgacttcatcatcatgaccaagaaggcccatatgttcatcacgggcccccaggtcatcaagtcggtcaccggcgaggatgtcaccgctgacgaactcggtggcgctgaggcccatatggccatctcgggcaatatccacttcgtggccgaggacgacgacgccgcggagctcattgccaagaagctgctgagcttccttccgcagaacaacactgaggaagcctccttcgtcaacccgaacaatgacgtcagccccaataccgagctgcgcgacatcgttccgattgacggcaagaagggctatgacgtgcgcgatgtcattgccaagatcgtcgactggggtgactacctcgaggtcaaggccggctatgccaccaacctcgtgaccgccttcgcccgggtcaatggtcgttcggtgggcatcgtggccaatcagccgtcggtgatgtcgggttgcctcgacatcaacgcctctgacaaggccgccgaattcgtgaatttctgcgattcgttcaacatcccgctggtgcagctggtcgacgtgccgggcttcctgcccggcgtgcagcaggagtacggcggcatcattcgccatggcgcgaagatgctgtacgcctactccgaggccaccgtgccgaagatcaccgtggtgctccgcaaggcctacggcggctcctacctggccatgtgcaaccgtgaccttggtgccgacgccgtgtacgcctggcccagcgccgagattgcggtgatgggcgccgagggtgcggcaaatgtgatcttccgcaaggagatcaaggctgccgacgatcccgacgccatgcgcgccgagaagatcgaggagtaccagaacgcgttcaacacgccgtacgtggccgccgcccgcggtcaggtcgacgacgtgattgacccggctgatacccgtcgaaagattgcttccgccctggagatgtacgccaccaagcgtcagacccgcccggcgaagaagcatggaaacttcccctgctgagcgaggagagaaattatggctgatgaggaagagaaggacctgatgatcgccacgctcaacaagcgcgtcgcgtcattggagtctgagttgggttcactccagagcgatacccagggtgtcaccgaggacgtactgacggccatttcggccgccgttgcggcctatctcggcaacgatggatcggctgaggtcgtccatttcgccccgagcccgaactgggtccgcgagggtcgtcgggctctgcagaaccattccattcgttgatccgggagtaactcacatgaaactgaaggtaacagtcaacggcactgcgtatgacgttgacgttgacgtcgacaagtcacacgaaaacccgatgggcaccatcctgttcggcggcggcaccggcggcgcgccggcaccgcgcgcagcaggtggcgcaggcgccggtaaggccggagagggcgagattcccgctccgctggccggcaccgtctccaagatcctcgtgaaggagggtgacacggtcaaggctggtcagaccgtgctcgttctcgaggccatgaagatggagaccgagatcaacgctcccaccgacggcaaggtcgagaaggtccttgtcaaggagcgtgacgccgtgcagggcggtcagggtctcatcaagatcggctgacgcacaacaagcacgcatcacaacaagcaggtggcccggaaccatgaggttccgggccacctgcttgtccatgtccgctcgctcgtcaccgggacgcacccgccccggcaggcagagcgcctcgcgggtgtcagtggcggtagaccttgtaattgctcacctgggcacgcggacgcaccaccatgcgatcaatgttcacgtgtgccgggcgggtgacggcccaggccacgcagtcggcgatgtcctcggccactaggggttcggcgacgccggcgtagaccgcgtcggcctcggccttgtcaccggcgaagcgggtgaggctgaactcgtcggtcttcaccatgcccggtgagatctccagcacgcggatgggtcgtccgcccagctccaggcgcatcgcaccggcgatattgcgttcggcggccttggccccgcagtagcccgccccgcccacataggggtactcggcggcggtggaggtgaggaacaccagggttccctggccggcctcgatccgggggagcagggccttggtcacccgggcggtgcccaacacgttgagctggtacatcttgttccactcgtcgaggttggcgtcctccacgttctcctggccgaaggctccgccggcgtcgttgaagagcacatccagctgcgccggcagctgggctgccatggcgtccacctgagcctggtcggtgacgtcacaggtgatggcgacaccgccgatctcctcggccaatgcgttgatgcggtcggtgcgccgcgccacgcaatagacgaggaagccgtccatcgccaggcggcgtgcggtggccgctccgatgccactggacgcgccagtgaccactgctgtcccgagtgtttctgtcatgtcacccatcgtgtcacgagtgggccgggtgtcatgggtcgaccggacgtccccagtgcgaaggcgtcacgggcaggcggcgccaccggatcattcctcgggtaacggggcgcggcgcgtgtcgatcaacggcgcgatcggcaccatctcgggacgcagctgcgagccgtcctgggtgagccacaggcccagcacctggctgacgatcgcataggcctgggcctcaaggttcgacccggaggcgtcggtgggggagtgcacccccagcgcgtgcatcaccatgctgccctccagcgcgtcggcgaggtacttcggcgatgcctcgggacgcagcagctggcgttcgcgtccctcggcaagcaggcgttgcaggcccaccagcgactgcgggatggtgcggttccagatcttgccgacggtgtcgggctcggcgtggtgttccacctgcaggcggatgatggccggcccggtgggcgtggaataggtgtagaggcggtgctgggtcatggtgagcaggcgctccacgaacggcaggcgacgcagctggcggtcatcgagctcgaacaacaccgccacgcggtcgaaggctgccgccaggagctcctcgcggccgggccagcgccggtagatcgacgacttgccgacgcgcgacagggcggtcacccgacccatcgtgaagcccgaccagccatggcgcccgtagacatcgagggcagccgacagggcccgcggctcgaccaggggatcgcgtgggcgtcccacggcggcgtcatgcgcgcccggaaccctggcacctgcggtggtcgtgtccccctgggacatcggtgtgcacccttcttcttcaggtcttcttgttcaagccttcacgtgccgattgtcgccacgccttccccgggggcacccccatccggccggtcaagggaccccggaagggcccccttcggccgggacggtgcaggcccccagcagcgtggcactgtggggctcatgatgccctatgggcgggccccgtcagcgtgacgtccgatccgttcccggcccaccactggcgagtttgggaccggatcggtccttatctatttcctcaggctagtcacttctgcgtcacgatggggccgcgcgtccgagggacggttctatagaatcgtgcacatgacctcgaagttgatcctgctccgccatggcgagagcgaatggaacgcgaaaaacctgttcaccggctgggtcgacgtcgacctcaacgagaagggcgtgcgggaggcatcccatggtggcgagctgctggcccaggagggactgctgcccgacatcgtgcacacctcgctgttgcgccgcgccatccacacctcgtacctggcccttgacaaggccgatcgcctctggattccggtgaagcgcagctggcgcctcaacgagcgccactacggcgccctgcagggcctcaacaagtccgagatccgcgaccagtacggcgaggagcagttcatggcctggcgtcgcagctacgacgtgccgccgccggccatcgagcccgacagcaagttcagccagttcaacgacccgcgctacgccgacatcccggctgacgagcgtccgctgcatgagtgcctcaagggcgtcgtcgagcgcatgcttccctactgggagtcgtcgatcgtgcccgacctgaaggccggcaagacggtgctggtggccgcccacggcaattcgctgcgtgcgctggtcaagcacctcgacaacatcgatgaccagaccatctcgggcctcaacatcccgaccggcattccgctgttctacgagctcgacgatgacatgaagccgctggtgcccggtggccgctatcttgacccggaggcggcagccgccggacagaaggccgtcgccagccagggcaagaagtagccaggccttccgggccggggtccgggtgacccggatcgccggctgaagacccgagggggccgcgcaccagatggtgcgcggccccctcgttcctgctgtatgggtcgtgctgtgtgggtcgagccgggtggttcttcccgtgcgccggcccaaaaggcgtcgtcgcaaacggtgtcgtcccggcgccaggcaggttggctcaggtggtcggccagtcgtcgccctcgggcgcctcgccggtgatgatgtagatgatccgccggcccatcgccaccgcgtggtcggcgatccgctcgtagtagcgccccagcagcgcggcatccacggccttctccacggccttgtcgacgccgtggctccactcctccgagacgatctggcggaactgggagctgcgcaggttgtccatctcgtcgtcatcgtcgacgagttcgtgggcctcctccaggttgcggtcgagcagggtgcgtccggccttgcccaccatctcctgggcgacgtccgacatcctgcggaagctgtccacgagcggctcgggtacggcatggtcggggtagcgcatgcgggcgatctcggcgatgtgcttggccaggtccccggtgcgtccgatgtcggccaccacctgcgtggcggccacgatggtgcgcagttcgcccgccaccggcgcctggcgcgccagcagcgtgaagcagcgctgctccagctcgtcgtgcatcgcgtcgatgcgcaggtcgccggcgatcacccgctcggccaccgacacattcgcgtcgagcagggcggtggtggcgtcacgcacggcaatctgcaccgaatccgacatcgtgaccagttggtggaccacctcgtccagctctgagtggtagtactcgcgcattcgttctccctgctggggcgctccgcgtcccgtggttcgttgccccgccggggcgctggtgtcccgtgactgatcgaaccgctgccggtcacccaccgcggcggctggtgatcagcacagtcctcgacaaggatgctaacgggcctgcgcgtcgcggtggtcatggatgcgtgacgcccatgtgaacaactggtgaacggcatgggcccccgccgcccggcgcaggcggggcggtgcggaagcgaccccgcgcgcggtcggggacggccggcagctcccctacaatcggccccgtgagccttgtccccgccgtgttgctcagccttgtgctgggtgccctcctcggcgccggcctcgccgcggtcatcagctggggcctcaatgcgcgccggcgcatgcatgaacgcccgccggtggtcgatcccgaggtggccgtcgtcgttgacgccctgcgtccccccgcggtggtggtggggccccatgacgaggtggtctgtgccaacgagccggcccgcaccctcggcctggtgcgtggggggcgcatcggcatccaccaggtgctcgaccaggtgcgtcgggcccgtgagagcggcaaggcgtcggtgcatgacgtgcgactgggctccgacctggccggtccggcacgcatcctcaccgcccgggtgcatcccatggaacgcgacgccgtgctggcgatcgtcgaggaccacagtgccgtgcttcgcgccgatgaatccaagcgtgacctggtggccaatgtgagccacgagctcaagacgccggtgggtgcgatgcaggtgctggccgagaccctgcaggcggccgccgacgatcccgaggcggtgcgccactttgcggggcggatgggcgtggagagcaagcgtctgggcgaactggtgggccagatcatcgagctgtcgcgcctgcagtccgatgatccgctgctgggcgcccatgtggtgtcggtggatgaggtggtcgcccaggcggcctcccgcacccacgatgcgctggtgggccatgaggtctcgttctcggtcaccggggacaaggggctcacggtgatcggcgacctcgaccagctgaccaatgccatcaccaatctggtggcgaatgcgatctcctattccgatcgtggtgcgcgcgtcgcggtgacggtgcggcgcgtcgcccaggccgacgaccactgggttgagatcgccgtcaccgacaatggaatcggaattgcccccgaggaacaggagcggatctttgagcgcttctatcgggtggattatgcgcgcagccgggccgatggtggcaccgggctggggctgtcgattgtgaagcacgtcgtggcggcccatggtggctcgatcagcctgtggagccgtccgggccagggatccactttcaccgtccgcctgcccgaggacctcgggccggtggcggacccggttccccaggatcaatccgccgccggtcgcgagcgaggagaataggcactgtgagtcgcattctgatcattgaggacgaggagtcctatcgggacgccatgtcgttcatgcttgaccgggaggggttcgccgtcgcggcggcgccggacggcgagcagggcctggccgaattcgatcgcaatggggccgacctggtgcttcttgacctcatgatgccggggttacccggtattgaggtgtgcaaggcgctgcggcagcgcagcgatgtgccggtgatcatggtgaccgcccgcgattccgaggttgacaaggtggtgggcctcgagctgggcgccgacgactatgtgaccaagccgttcagccagcgtgagctggtggcccgcatccgcgccgtgctgcgccgcgggcgtgccgaggaactggtgcccgatgtgctcgagagtggcgatgtgcgcatggacgtggagcgccacgaggtggccgtgcgtgacgagccggtgcgcctggccctgaaggaattcgagctgctcgagctgctgttgcgcaattccggccgtgtcatgtcgcgggagcaactgattgatcgggtctggggatctgattacgtgggggatacgaagacccttgatgtgcacgtcaagcgcctgcgcgccaagatcgagctcgatccgtcacatccgacggcattggtgacggtgcgcggactcggttacaaattcatgggctaactgaactccccttcagttttctgaaatgacaacatgaattgtccgacgcctttcggatgattcgcgacgggcgaaatcccggggcaatggcctttccttacaatgcctgtggtagaataagaaggaggagaggtgcatatatgactttcactgtcggcgagaccgtcgtctaccccaaccatggcgcggccgtcatcgaggacaccgagacccgcaagatcaagggtgaggacacgctttaccttgtgctgagaatcctcggtcagactgacctggtcgtgagggtgcctgcatgcaacctcgacctggtcggtgtgcgtgacgtggtcgacgaggagggcctcgagaaggtcttcagcgtgctgcgtgcgccccatacggaagagccgacgaactggtcgcgtcgctacaaggccaatcttgagaagcttcactccggtgatgtcatgaaggtctccgaggtcgtccgcgacctgtggcgccgcgagaaggagcggggcctgtcggccggcgagaagcgcatgctggccaaggcccgtcagatcctggtcagtgagctcgcgcttgctgagaaggtcgaggaagagcgcgccgaggtcatgctcgacgaggtgctcgcttcctgatccgcgccggtgcgcgcggcacgatcggctcgtgaccggcgcccggaccgcacgaacattgacatgtccgaagaatctcgtatgtccgacggtggggccctgccctcgaaccgtcgagtgacagaacatgacacgccggagccggtggtcgccatcgtggtggctgctggctccggcgttcgtcttggcaattccagcgccggcggccacggccccaaggcattgcgcaagctgtccggggtgcccctgttgcgccacagcatcgatcggctcatcgccgggggagtggaccgcgtcgtggtcgtctcccgccctgagttccgcaagcagatgcgcgccaccctggccggaatcgacttacccatcaccttcaccgatggcggtgccacgcgcaccgactcggtgcgcaatggcctgcgcgtgctcgagggggtgccgccggtggtcctggtgcatgacgcggcgcgtccgctggtgcccgccgaggtggtctcccgcgtgatcgctgcggtgcgcggtggttcgtccaccgtcatcccggtgatctcgctgatcgactcggtcagggccgtggaaccccatggcagccgtgtggtcgaccgctccggcctgcgcgccgtgcagacgccccagggcttcgacggggccaccctcatcgatgcctacgaccacctgccggccgacacgctgttcaccgatgatgcctcggtgtgcgaggcgcagggctccgaggtggccctggtcgagggttcggtgttgtcgatgaagatcacccgtccccatgacttcctgttcgccgaagcgctgctgcaggcgggcctggcgtgagcccgatgcctcccggcgcggcgtcgatccgcaccggcatcggaaccgatgtgcatgccctggtggccggcgtgcccatgcactgtgcaggcctgttcttccccgatgagccggccggcctcagcggacactccgacggtgacgtggcggcgcatgcgctgtgcgacgccctgttgtccgccgcgggactgggggacatgggttcgaacttcggcaccgccgagccccagtgggccggcgcgagcggtgttgccttcatcgtcgagaccgcccggcgcctgcgcgcggccggctgggcgccggccaatgccgccgtgcaggtgatcggccagcgtccccggatggcctcgcgtcgcgaggaggccgccgccgtgctctcgcaggcactgggtgccccggtgggggtcagcgccaccaccaccgacggactcgggttcaccggccgtggcgagggagtcgccgccgtggcgactgccctgatcaccgccgccggctgagctcccgcaggctgccgcgcgcggtcatccccgggcgcccgggtcggccctgcccgtaggccatcacgccggcaccagacgcctccgtcgcgcccgcacaacaccaccacgcgcgtccccagacacccatgagggcccgcacatcctgccgtggcaggtgtgcgggccctcatggccatggctgacgcgggtcagcgcctcacaggtcgagtcccgggtagagcgggttggcgtccagcagctcttcggtctcggcgtgcacgcgggcggccaggccgtcggtgatcgtgtacttggccttcgacggggtgcccttcgcggtggtggcgacgctcgtgcccgacagcacctcgcagatcagcgaggcgacgcggtcgaactcgtcggtgccgaagccacggctggtcagcgccggggtgcccagtcggatgcccgaggtgtaccaggaaccattggggtcggccgggatcgagttgcggttggtcacgatgcccgcctcgatgagcgccgactcggcctggcgtccggtgagcccgaagttcgagccgacgtccagcaacacgatgtggttgtcggtgccaccggtcaccagcgtggcaccccgcttcatgaggccttctgccagggtcttggcatttcccgccacattgcgtgcgtactcgcggaacgagggctgcttggcctcggccagggccaccgccttggcggccatcatgttggcgagcgggccacccagcaccatcgggcagccacggtcgacatcgtcggcgaactcatgctccacgagcaccatgccaccgcgcggcccgcgcagcgacttgtgggtggtggtggtcaccacctgggcatgggccaccgggtcctcgtcgccggtgaacagcttgccggccaccagcccggcgaaatgcgccatgtccaccatgagggtggcgccgacctcgtcggcgatctcgcgcatcttcgcgaagttcacccggcgcgggtaggcggagtagccgcccaccaggatcagtggcttgaactcgcgcacctgggcacgcatcacgtcatagtcgatgagtcccgtggtcggatcggtgccatagctgtgctggtggaacatgcgtccggagatgttggggcggaagccgtgggtgaggtgtccgccggcgtccaggctcatgcccatcatgcgctggtcgccgaactggtggcgcagcgtctcccagtcgtcctccgacaggtcgttgaccgagcggacgcccttggcctccaggtcgggggtctccacccggtgggtcaggatcgtccagtaggccaccaggttggcgtcgatgcccgagtgcggctgcacataggcgtggtcggcgccgaacagttcctcggcgttcctggcggcctcggcctccacggtgtcgacgttctggcagccggcatagaagcggtggccgatggtgccctcggcgtacttgtccgagaaccagttgcccatcgacagcagcgtggccagtgacgcatagttctccgacgcaatgagcttcagcgaggtgcgctggtctgcgagctcctggcgaatcgcctgtgccacggtgggttcggtcgcaccgatgacattcagcatcgcgcggtaggcgatggtggcttgctcgttgagatcaatatcggacacgaatgactcctagtgccggtgggcgttgcgccagtggctggctgcgagtgacggtggtcgaagcgttccgggccctttcacgcgaaatcgcccggatggggccaaatctaccgtgagtcgcgcggcggccggtgccgggccgtccgcgctgatcaccatgttccggccaccggaggacgacccccgggcgccggtggcgccgggccggccacgaaccggatcaggcctgtggttcggtcagttccccggcgatgttggtggacatgaagcgggagacctcggcgggggccagctgctggctgagcaggaagatcagcttggcgtaggtggcctccagcgtcatatcgcccgatcccaccgcgccggcctgcaacagcgcgtagccggcgtcgtagtgccccaacagcacatcggcctggtagcactgcgaggtgaccaccagcggcaccccggaggccacggttgcatccagcacctgggccaggcccggctcctcgctgggcatgttgccgacgccgaaggcgcgcaggatcaccgcctcgggtgcggggtcaagggcagctgccaggcgcgcggcggtgatgccgggggccaggtcgaccaccggcacgtcgtggcgggcatagggctgcggatcgtcccatccgctgccggccggcagctgcgggatccattgccagggtgccccggtgcgcgccagctcgggcacgctgggggagtcgaagccctggaaggcccacgacgatgtcttggtggcgcggttgccgctgagcagcttgtggccgaagaacagtgccactccctcgaagcgccccgatacggcggcccgcagcgcgccggtcacattgggtgccgcgtccgagccgacgacgccgagcgggtactgggcgccggtgagcaccaccggcttgccgaagccggtgagcgcgaagctgagcgccgaggcggcataggccatggtgtcggtgccgtgcagcacgatgaaggcgtcggcccggtcacgggcggcccacagctgcgagaccatcagcgcccagtcatccggcgtggcattggacgagtcgatgaggtggtcgaagctcgtcatggtgatggtgtcggccaggtcggtgtcggtgagcagccgatccagccagctctcgaggtcggcgcccggcgccaggccgtgctcggtgctgaccatccccagcgtcccgccggtgtacagaatgtgcactctcatggtgtgcctctcagctggtgccagcagcgttgccgtccgtgccgggggcctctgccccgtcgtcgtcaagaccgggggcggctgccccgtcgtcgtcaagaatggtatccatcagctcggcgtggatgcgcttgcgcaccgcgaaccagccggccaccatcagcacgacgacgccaccgaacatcaggatcgtcttgcggcccacgtcgggatcgaaccacatggatccgatgacggcgacgaagaacaggatggccacgatgttggtgtagggggcgccgcgcagctggtagctggggcgcacgatgaggcccttggccgcccggcgggtgaagatcaggtgcgacacgaggatcgagatccaggtgccggcgatgccgatgccggccaggttcatcacgatctcgaaggcgttggtcgggtagacgtagttgatgagcacgccgatcaggccgagcccggcggtgatgatgatgccgccatagggcacatggctcttgttgagcttcgacgcgaacttcggcgcctcgccggccaccgccatcgagcgcagcgtgcgtccggtggcgtacaggccggcgttcagcgacgacagggcggcggtgagcacgacgatctgcatgatgtcgccggcgtgcggcacgccgatgcccgagaagaaggtgacgaagggcgactcgttggccgagtaggaactccagggcagcaccagcgtcatcagcacgaccgagccgacgtagaacacgaagatgcgcacgatcatcgagttgacggccttgggcaggatcttcaccgcatctttggcctcgccggcggcgacgccgaccatctcggtgccgccgaaggcaaagatcacgcccagcgacagggtgagcatcggggccacgcccatggggaagaagccgccgtggttggtcaggttggcgaatccggcgtgctcattggccacggcgtggccggtgatgatggcccagatggccaccgccatgaaggcgacgatggcaaccaccttgatagcggcgaaccagaactcggcctcgccgaagtacttcacgctgaacatgttcagcgtgaacaccacggccagcgcgatcatcgccagcagccactgggggatgggctcgaagaagcgccagtagtgcaggtagagcgccacggcggtgatgtcggccatcacggtggtcgaccagtccaggaagaacagccaaccggtggtgtaggcacccttctcgcccatgaactcacgagcatacgacacgaaggcccccgatgagggccggtgcaccgacagctcaccgagtgcccgcaccatgatgaaggcgaagatgccacagatggcatacgagatggccagggccgggccgcccttggccagtcgtccgccggcgcccaggaacaatcccgtgccgattgacccgccgatggcgatcatccggatgtgccgggtcttcaggcccttctggtagccggcatcggccttgtcgaccatgggggccgccggtcgtgccttgacgggctcggatgaactcatcgtcgaactccttgtcaccgattctgtggttcggccgggctcggggccgtgtgacggtcaccgggacggggtcgaaagctgcttccgcgaaaatctcatacatgagtatgctccggcccacattaacgcgcatcatcgggttggcgcaggagaaatcatggtgatcgccctcgcgacacgaaatgttggtgtgtgggcccatgctcgccgcaggcaggggtccccggcccgcggtggcccgcaagatcttcgggatggcgtggccgcccccgtgtgcgacgccgatggtcgatgccgcgattggggtgctatcgggtctcaggtgtcgaggatcgagtcgagcagttcgcccttgatgcgcttgcgcaccatgaaccagccgaccaccatggcgatcagcaccagcccgaagatcatcagcgtcggacgccctccggtgggatcgaaccacatggccacgatcaccccgaccaggaagatgatcgtcaccgcgttgagcaccggcgccccgcgcaggcggaactccgggcgggtcatctcgcccttgcgtgccttgtggacgaagatccagtgcgacacgaggatcgagatccaggtgccggcaatgccgataccggccatgttcatgaccatctcgaaggcattcgaggggaacacatagttgatgagcacgccgatcaggccgagcccggcaatgatcatgatgccgccatagggcacatggtgcttgttcatccgggccgcgaaccggggcgcctccccggccaccgccatcgaccgcagcacccggccggtggcatacaggccggcgttcaccgacgacagcgccgcggtgagcaccaccacctgcatgatgtcgccggcgtgcggcacgccgatcgccgcgaagaaggtgacgaagggtgattcatgttgtgaataggcactccacggcagcaccagcgtcatgaggatcaccgagccgacgtagaacacgaagatgcgcaggatcatcgagtggatggccttgggcagcaccttctcggcgccggccgtctcgccggcggcgacgccgaccatctcggtgccgccgaaggcgaagatcacgcccagcgacagggagatcatcggcatgaggcccatcgggaagaagccgccgttgtcggtgaggttcgcgaagcccgcccgtcccggcccgaccgcgtggccggtgatgatggcccagatggccaccagcatgaagatcacgatggccgccaccttgatggcggcgaaccagaactcggcctcgccgaagtacttcacgctgaacatgttcagcgtgaacaccagggccagcgcgatgagcgccagcaaccactgcggcaccgggtcgaagaagtcccagaagtggaggtacagagcgacggcggtgatgtcggccatcacggccgtggaccagttgaggaagaacagccagccggtggcgtaggcgcccttctcgccgatgaattcgcgggcgtatgacacgaaggcccccgatgagggacggcgcaccgacagctcgccgagcgcgcgcaccatgatgaacgcgaagaccccgcagatcgcataggacagcgccagggaggggccgcccttggccagccgggtgccggcgcccaggaacagtccggtgccgatggatccacccagggcgatcatgtggatgtgacgggtcttcagccccttgtggtagccgtcgtcggccttgtccacgtgtgcatggcccccatgtgcgggatcagtgggtgcgggatcagtgggtgcaggatcattctggccatgtgccaccgcagtggaatcgggctcacctgagctcatcgtcgatgaccgggacccgggcccacggacgacgatgtccgcaagatttccggcaggcagagcggatgccgcggatcccacgacgagtatgcacccgccaccagcaattctgctgtcatcgtggaacggtcgccgcgaggtgtcttctcacggcataagcgggggatcgcccggcgtcgcgtcgacgcaatcgcgtggcctcagccgcgcgcccgactcacctcgtacagcgcgatggcggtggccaccgaggcattgaggctctccacctcgctggtgatcggaatcgacacgagcacatcgcagtgctcccgcaccatgcgactcaggccggcaccctcggagcccaccacgagcaccaggggaccattgacccccgggatcccggcgatatcggtgtccgcctcgccggccaggccggcgaccacgaagccggccttcgccagccgttccagcccccggttgaggttggtcaccttggccacgcgcagccgagcggccgcgccggccgacgccttccaggcgctggccgtcagcgacgcactgcgccgctcggggatgatcacgccgtcggccccgaaggccgcggccgaacggatgatcgcgcccaggttgtgcgggtcggtgatgccgtcgcaggccaccaacagcccgtggttgtcatcgcgacccagggccttggtggccacctcgtcgatgtcggcatattcatagggcggaagctgcagtgccacgccctggtgcacggcgccgtcggtcagcttgtccagttcctggcgcggcacctgcaacagcgacagcgagtgctcagcggcgtacttgaagatctcgcgcagccggtcatcgtgctcggaaccctccgcgacataggcgcgtcgcaccggcaggttcgcctgcagtgcctccagcaccgggttgcggccgaccacccagtcgggtgcggcaccccgccccgtgctcgagggcttcgccccgtgtgagggacgcgtgcccttgcgcgggccctggtcctgcttggcgcggtaggccttgtggtaggtgcggtcctccgccttcggcgtgggtccgcgaccggtcagcctgcgtcgtcccttgccgccggtgcccttcttcggcccggccatcaggcgatcgtccaacgcgtgccattcgcgccgtcctcgagtcggatgcccagctcggtcagcgagtcacgaatatggtcggcggcggcgaagtccttgcgttcgcgggccgcctgtcgctcatcgagcaccagtttcaccaatccatcggtcacggccaggtcggtgcccccggcctgatcggcccactggggttcatgggggtcgagcccgagcacgtgcagcatggcgcgcacctgcgccacgcagttggtcgccgcgccctggtcgttggcgtcgaaggcgcgattgccttccttgatggtgtcgtagagcaccgcgaaggcggcgggcgtgccgaggtcattgtccatggcctcgacgaaggcatcgggcaggtcggcggtgtcgaatgccgcctggccggacacatgggcccggttgaggaaggaatcgatgcggtcgagctgggcggtcgcctcggtcagggaggtgtcggagtactcgatggtcgagcggtagtggggttgggccaggtagaggcgcaccgcgcgggccggatagtgcttggtcacctcggcaacggtcgccccgttgcccaatgacttgctcatcttctcgccggccatcgtcacgaaggcgttgtgcatccagtagtgcgcgaagtcgtagccggccgcgcggctctgggcctgttcgttctcgtggtgggggaagcgcaggtcgatgccgccaccatggatgtcgaaggcctcgccgaggtacttcaggctcatggccgagcactcaaggtgccagccgggacgtcccctgccccaggggctgggccacgatgcggtggcgggttcgtcgggcttggagcccttccacagggcgaagtcgcgcggatcgtgcttgccgcgcgggtcggcgtcggtggcagccaccatgtcgtcgatcttctggtgcgacagctcgccgtactcgggccagctgcgcacgtcgaagtagacgtcacccgagccatcgtcggccgcataggcatgtccgcgttcgatcagccggttgatcagctcgatcatctcggtgatgtgcccggtggcgcggggctcgtagctgggtgggatgcagcccagcgacgcgtaggcgcggtgcagttcgagctccacggcgtaggcgagctcgaaccattccagtccggcctcggccgccttctgccagatcttctcgttgatgtcggtgatgttggccaccacgcgcacccggtagccgctggcgtcgaaccagcgccgcaggacgtcgaagacgacctccttgcgcatgtgccccagatgcggggagctctgcacggtcaatccacagtgatagatcgagaccttccccgggatcaggggaacgaagggcacgacctggccactggattcgtcgtacaggtgaaatgacacgggatcagtctaaccgtgccggtgcctgcacttcgaggcatgcacaccgtctcggcccacggatggccccggtacggcccgggccatggtccacggacggccccggcggctccccgggggctggcgtcagccggcgctcggcgtggtcagctgcgccgatacatcggtggcgccccggctgcgcgagggcctgcgacgtgcggccaccgcctttgcgcgggccttcttggccggtgccttcacggccggacgcggtgcggcgccgtcgtcggcacccggatcggccggatccgtgccaaccacggtgtgcgccgcgggggagtggccatgggaatgcccgtggtgggcggagtcctggatggcggccccgggtcgtagcgccaccaccgctgcctcggcggattccaccgcgtcggtggcctcggcgatcggcttgtcgggcagcaactgggcgtaggcatggcggatgtggccctcggcgagctcggcggcgcgctcggcgtcgccgtcggtcacggcctcgaggatcgcgcggtgctgggccaccaggccgtcgcggaagtcgtcccagttcgtcagggacgcctccgcgctgcggatcgggatggccagtgtctggcggatcgcggtcgacatcatggtgagcatgtggttgccgctcgcgtccacgatggcaatgtggaaggcggtgtcgaggtcattgaactcgtcgatggtggggcactgctccatgcgttccacgatcgcccgcgcgcgcttgagcgcgcccacggaggcatggtgggcggccatctcggtggcggcgcgttccaccaccaggcgggtctgggtcaggtcgggcaccgaggtgctctccagcgccaggtgcaggcgcaacatctgccccagcgcgtcgcccggcgtggtgcggatgcgggtgccattgcccgggccggttcccgagaccacgatgccctgtgcctgcagcacgcgcagtgcctcgcgcaccgcgccacgtcccacggccaggctggcggccagttcgcgctcggtgggcagctgcatgcccgccacatagtggccggacaggatctcggactggatgtggtgcagggcgatgtcgaagcccgacatgccgcgggcgcgcatgatggcgcagtcctggcatcgctctgtgccttcgagagtggtgacgccccccgcgctggatgcctgcatgcagccattgttaccgatgttcaaaaaagatggcgactgttgggccgatgagatcgcgatgctgcaccgatgttcaccgccgccgcacgacgcgccgaactcgtgcacgggacgtgcccacagcgggtcgatgcgtgcggtggggcacgggccgatgcacgagtcggggcgtggccagcgcgatcaccccacccgccgcaggccccggacgtcgcacagggtagacttcgcaccccccaattccgcgcccggaacggggcgtcaaccagcggtcgagaccggtttgcgcgttggcgtcgccattctgtgtcagaagcggcaaacggccttgacctgacgaattggtcggacctattgtgtcgagagatgaaccgatgtctcacagtcgagatctcggtgcagtagttctctcaccacagatcggggggtcctccgtggtcctgctacaagtcttcacacccaacacgaacccattagggcatcagtgggcgtcggcattggtcgcgctcattcccattgcctgcatgctggtgacccttggcgcgctgcgatggaaggcgtactgggcaggactggcgtcgtggttcctggcactggtcgtggccatcgcggcgttcaagatgccgatcggcatggccttctccaccagtgtccagggtttcctctacggcctgttccccatcggctggattctgctggccgccatctggatgtaccaggtcaccgtcatctccggacgcttcgatgacctgcgccgcacgttcttcatgatcagtgacgatccgcgcgtgctcggcatcctcatcgccttctgcttcggtggtctgctggaggccctcgccggcttcggcgcccccgtggccatcgccgccgccatgctgatcgcggtcggcttcggcaagctccgcgcagccgtcaccgccctggtcgccaatacggtgcccgtagccttcggtgccgtcggcctgcccgtgctgatggccgccaagacggccaacctcgacgtgatgcacattgctcccgtcaccgcgcgcatctgcgccatcctctgcctggtcgttcccttcctcatgctccagatcatggacggcaagaagggcatcaaggagtgctggcccttcggcctgttcgtcggcatcgtcttcggcgtcgtcaagtggatcgtcgccggtactgccctgtacaacctgaccgagatcttcgccgctgtcatcaccgtggccctggccatggtcttcctgaaggtgtggagccccaagggcggcgccgctgccgctgagcgcatcggcatcccgatggacaccaccctcgaggatggcgccatcgagaagaccgaggacgcctccgccgacctcaccgccggtcgcatcatgatggccctggttccctacgtgctggtcatcgcgatcttcgccttcgccgcgctgggcccgatcaagagcttcctgctcaagggcgacgtcaagatggcctggcccggcctgtcgcagatgatggccgccaatggctcctcgccgtcggcgcaccagtcctacacctggcagtggatgtccacgcctggcttcctgctggccatcgtcgcgatcctggtgggcatcatctaccgggtgaagttctccgacctgttcaaggaactgtgggtcaacctcaagaagatgaagttctcgctgaccacgatcggcctggtcgtcgcactggcctatgtcatgggtgactccggccagacgcttgccctgggcctgtggatcgccggcgctggtgccgtctatccgttcctggccccgatcctgggctggatcggcacctatgtcaccggttctgacacctcggccaacatcctgttctccggcctgcagtccggtgtcggtgaccagatgggcgccggttcgcacctgggcgtcaatggcatgaaggacctgctggtcggcgccggcgcagccggtggcgtggtcggcaagatgatctcgccgcagtcgctgacggtcgccgccacggcaatcggcctggtcggtggcgagtccacgattctgcgcaaggtgttcaagtactcgatcatcctgctcatcctcatgtgcatcctggccggcctcatgtccacgccgatcctgagttggatcctgccggcgtcggtcaagtgaatctgaatcttcccgaaaacaaccccttggaggttttgcaatgaccaccacgaccaactcgtccgggataaccggacgggccgcgacaccggggctcccgggcgcgggactcgacgtcgcagtgttcgtcacgtgtatcaacgacgtgatgttcccgcagaccggcgtcgcagtcaccaagctgctggagcggctcggttgccgcgtccactttccgaaggaacagacctgctgcgcgcagatcaccaccaacaccggctacttcgatgagtcgatgggcatggttcgctcgtatgtgaaggccttcggcgactacgactacgtcgtgtccccgtcgggttcctgcaccgccgccgtccgcgaccagcatccgatgctggccagggccgccggcgacaagggccttgagcgcgatgcggagcacaccagcaagatcagcttcgacatcaccgagttcctggtcgacgtgctgggtgtcactgatgtgggcgcctatttcccgcacctggtcacctatcaccccagctgccacggcctgcgcctgctgcacctgggtgatcgtccctacgagctgctcaagaacgtgcgcggcatgacgatggtcgacctgccggccaaggagcagtgctgcggtttcggcggcaccttctgcatcaagaactccgacatgagcgcgacgatggccaacgacaaggcccgtcatgtgcgtgagaccggggccgagtacgtggtggcgggcgacaactcctgcctcatgaacatcggtggtgttctggcccgccagaactcaggtgtcaaggcgatccacattgccgagatcctggccaacacggaggaggacgagtcatgagcaccgaactgcgtcgaatcaccgagggcaactacggtgtggcacgcctgaccccggctcccgagcaccccggcaccttcctgggcatgccgaagttctcgaaggccgtcaagggtgagctgaagcttgccgtgcagcgcaagaacatgcgcaacgcgatgaccaccatccgcaacaagcgcgccacccgcgtcgctgagtcgccggactgggaggacgtgcgtgaggccgcctacgagatcaagaaccgcgtgggacgtcaccttgactactacctcgagcaggccgagaagaacctgaccgcccatggcgtgcaggtccactgggcccgtgacgccgccgaggccaaccggatcgtcggcgacatcgccaagtccaagggcgtcgatgaggtcgtcaagatcaagtcgatcaccactcaggagactgacctcaacgagtacctcgagtcgcagaacatcgcggcctgggagaccgacctcgcggagctgatcgtccagctcggccacgaccgtcccagccacatcgtggtgcccgccatccaccgcaaccgtgcggaggtccgcgagatcttcgtgcgcgagatgaagaactacggccgtccggctcccgaggatgtcagctcgaatcctcccgacctggccgacgccgcgcgtctgcacctgcgtgagaagttcctgcgcgccaaggttgccgtctccggtgccaacttcatcctggccgataccggctcgatggtgatcgtggagtccgagggcaatggccgcatgtgcctgacccttcccgacaccctgatctcgctggtgggcatcgagaagatcctgccgacctatgacgatctcgagatcttcctgaagctgctgccccgttcggccaccggtgagcggatgaatccgtacaactccgtgtggagcggcgtcaccccccatgacggcccgcaggaacagcacgtcatcttcatggacaacggtcgcaccaatgtgcttgccgacccgatcggccgtcaggtgctgcgctgcatccgttgtgcctcgtgcatcaacgtctgcccggtctacgagcgcgccggcggccacgcctacggctcggtctaccccggccccatcggtatctccctgaccccgcagctgcgtggcctggacgatccggtcgaccgcggcatgccgtacgcatgctcgctgtgcaatgcgtgctccgaggtgtgcccggtgaagatctccttcgtcgacgtgatcatccacctgcgcaaccaggtggcacaggccgagaagatcgaccacggtcacggtgacgtggaggtgctcggtgagcagggcatcatgaaggccgcccagtgggtgcttggcgactacaagcattgggagaccaccatgtacgccacccgcgccgcgggtcgtgtgctcggcaacaagccccttgggcccatcccggtgccggttgccgaacgctggctcaagtaccgcgatgtgcagccgattccgacccagaccttccgcgactggtggaagcagaaccgcgttgaggacgagaggtaatcgcaatggacgcgaagcaagagattctcgcccgcattcgtcgggccacgatcgacatcactgagaaggaccccgtcaaggaccagcccgtcaactggacctatggcggcggcatcgagatggaagacgtcgtgggcaccttccaggagaaggtcgaggactactcggccacggttgtgcgcacccgcgaagccggaatccccgaggccgtggtcgcaggactgaaggccaccggcgccgaggaatcggtggtggtgcccgcaggcctcgacgagtcctgggtgaaggccatcaaggccgccggttacacggtgagcaatgacgagccccagctgtcgaacaaggaactcgacggcaccgacgcagtggtcacggcttcggcctcggccatcgccgacaccggcaccatcgtgctcgaccacaccgaggaccagggccgtcgcgccctgagcctggtgcctgatcgtcacgtctgcgtggtgcgggccagcgaggtcgtctcggatgtccccgagtcgatccaggcgctcaagccgtcggtgcatgccggtcacccgctcaccttcatcagtggcggttcggcaacgtccgatatcgagctgtcccgtgtggacggcgtgcacggcccccgcaagctctacgtggtgcttgttgaggactgaggctcactgagctgaatcatcaggggttgggggccacgacattgtgtcgtggcccccaaccctttccctatgcactttctttgttccttttccgcgcacccttcacccccacggggccggggcccgtggggtgctcgcagctgccaccgagcgtcgtcccagctccctcacgggtggtccccactaggctgggttccggtcccagcgaaaggtgcgcacgatggcagagatccgcaagcacaggcccaaggccaatctgatcggcgatcaggtgagggctgcgatgggcgacgccgtgccgcgtccggtcgtgccgggctcgcacaaggtccccgcggctcccgaggcgtccggggatgacgccacgacgagcacgggcggacgcacccgcatcgacttcgatgcggtggccgagcatgagctggtcgaccccttcttcgtggaggttcccaccgaggagccggttgcccccaagccggacgcagcctcggaacaggccggtggctacaccctgcgggccgcggatcgtggcggcctgatcagcctcggagccgacgacatcaatgccatctccgtggtcttccgcgaggtcgaccgcgatgaggacgacgacaccgactaggcacgggcccgcaccaaccggtgcgcggctgtccgacgcagggcctcagccgcgggcgcgcagttcgttgatgtcgaagtggttcagctgtgacacgtcgacgtcctgggccgcgtcctcccagggatcgtgcaccgggggcaggtcgtcatcgtcggcgtagcccagcgagggatcatagggattggccagctggcggttgtcgccctcctgcacctgcaccatggcatcacgcaccattgcctcatcgggcaggttgcgcaggatgtcgcggatatagccctgggtggccaccgacagcggcacctcgcgcttctcgcgctccgacatgtaccagcggtagtccagcacctcgtggtagatctgcgccgggtcgcgcttgccctgcagctccggcggcacggcattgaccacgggttcgaagaactcggtgagccactggtgggccaccaccgcctcgtcgacgtcctgttggttcgtgcgtgcccggaaggtgtccaggtcgttgagcaggcgtcgggcctggttctcctcggtgtccagcccggtgagccgcaacagtcggcgcgaatggtgcccggcgtcgaccaccttcggttgcagggtcacggtctgaccatcggcgctggtgcggatatcgagttcggccacgtcgaatcccagcgcattcagcctgcgcacgcgactctcaatgcggtaaagctccgagccggagaactcctccatcccggtgagctcgttccacagctcctggtagcgggattcgatcgtgtccaccagcaccatcgggtcgagggactcgtcgagcatgccaccggcctggaggtcacagaagtcaccgaacacattggtgcgggcgatatccaggtcatgggcgcgctggccgtcggtgagccggtcatgcagttcgccggtctcggcgtccaccagatacgcggcaaatgagcctgcgtcgcgtcggaacaggatgttcgacagggacacatcaccccacatgaagccctgcaggtgcaggcgcgccagcaacaccaccatcgcatcgagcaggcgcatcaccgtctcgtggcgcacacccggggtgaacagcgagcgatagggcagggcgaactcaaggtgcttggtgaccagtattgaatcgagcgggttgccctcgaggtcctgacgcccactcaccaccgccaccgcctcgacggccggggtgcccaggcgggtgaggtcatgcagcagccggtactcgtggatcgccaggtgctcgatcacttccttggccgcatagacctcatcgcccaccgtgatgaagcgcacgacgtggcgcgagatgccgcgcggcagggcaacgaggtgctcggtgggccacttcgccaacggcacattccacggcagcggaatgagcctggcatcaggcttggcggacaggaatcgtggcacccgtccagtctgccacccgtgtgggcgttcaggcacccggacgcccgcgggccagctccctccccgcgggagggagctggtggtcaggcgacggcgcggtcgagggccgagcggatctcgttgagcaggtcgtccaccggctcaatgcccaggctgagccgcagcagcgagtcggtgatgccggcggctgcgcgggcctcgggtgacatgccggcatgggtcatggtggccggatgggccagcagcgactccgtgccgcccagtgattcggccaggtcgatgatctgcagcccgtcggtgaagcgacgcaccgcgtcgatgccgccggtcagttcgaagctcagcagggaaccgaagccggactgctggcgtgcggccaggtcgtgcccgggatgcgtggccaggccggggtagtacacggcctgcacggccgggtggttgctcagcaactcgaccacggcggcggcattggcctggtgcacgcgcatgcgggcgtcgatcgtgcgcagcccccgcagcgtcagccaggaatcccaggcgccaccggtgaggcccagggcattggcccagtgggccaccagctcaccggtctcggcggtcttggagatcacggccccgcccaccacgtcggagtggccgttgatgaacttggtcgtggaatgcaccaccacgtcggcgcccagggtgagtggattctgcagcaacggtgagcagaaggtgttgtcggccaccacgatcgcgcccgccgcgtgcgccaaccgggccacggctgccacgtcggtgatgcgcatgagcggattcgacggcgtctccacgaacaccagctcggccggtgtcgccagcgcacgggcggcctcgtcgaggtcccacatgtcgacgaactcgacgtcgatgcgctgcttggtggccaggtggtcgagcagccgccaggtgccgccgtagcagtcggtgggcgccacgacgcggccccgcgggccggtcagcgcctctaccgtcgcggtgatcgcgcccagcccggagccggtgcccgtggcggtcacgccgtgctccatggtcgccagggtcgtggccagcatcgcgcgcgtcggattggccgagcgcgagtagtcgaagggcggacgctcgtcgatgctggggaagcggtagttggtgctgggatacagcgccggcaccaccgatccgaactgggtgtcggtgtccagcccggcacgcaccgcccgggtgagtgctgagagttcgggggacgggtcctttccggactggtcgctcatgtgcttcctcctggccgatcgggtctgcgggcagctgcccatgaaatgaccctagccgcatgggcgtcggcggctgccccgtgccagaagcagggcgccggaagacgcctgccacgagcgggatgtcgggagcgtcatgccgcggcacggcagaagggtccgcccccacgtggggtggacccttctggtcagtcagcgttgggctggatcagccacgctgggttggttgcgtcggatcagggttggttgcgtcggatcaggagatccgctccgtggtcgacttgtcgaagacatgcaccttcgacggtccgacatgcaggcgcacgatctctccgcgggccgggggagtgcgggtggtcacgcgggccaccacctcctggtcgtccgagggattggccgtggcggaatcgtcctggagcgttccgtagaggtacgagtcggcgcccgtctcctccaccacgttgatcttcatgccgatcccctcgcccgagggcgacacctcgaaggactcggggcggatacccaccaccacgtccttgctgctggccttgtcgagcacctcgcgcggcaccggaatcacgtggtcggtcacctgcacaccgtccgcgacgatcgtgcccggcatcaggttcatcgccggggagccgatgaagccggccacgaacaggttcttcggggtgtcgtagagggccagcgggcggtccacctgctgcaggacgccctcattcatcacggccacccggtcgcccatcgtcatggcttccacctggtcgtgcgtcacatagacggtcgtgacgcccagtcgggtctgcagtgcggcgatctgggtgcgggtctgcacgcgcagcttcgcatccaggttcgacagcggctcgtccatgaggaacacctgcgggtcgcgcacgatggcgcgtcccatggcaacccgctgacgctggccacctgacaggttcttgggcttgcgcccgagcagttcctccaggcccagcagcttggcggcctccagcaccctcttctggcgctcctccttgccgacgcccttcatcttcagggcgaagcccatgttctccgccacggtcatgtgcgggtacagggcgtagttctggaagaccatggcgatatcgcggtccttggggggcaggttggtgacgtcgcggtcaccgatccacaccgaaccggaattgacttcctccaaccccgccagcatgcgcagggaggttgacttgccgcagcccgacgggccgacgagcaccatgaactcgccatccccgatctcgaggttcaaatcattgacagctgcgtggtcggcgcccgggtagaccctcgtggcgtccttgtatctcactgtggccattgattcagccattcctttccacgggcaggtacgtgcccgacgatccttggtagataaggcagggaaagattcccgtccccaaggatggcacaagctcccacatcgttgggggacgctccgggatttctgtcatcgacgcggtggcgaacctgctcgtgagaccagcaaccccacggcatgcggtgcctggcagtgctacggcaggttggacccggcagcacgggggcctaacagttcgccaggttgacggccaggccgccccgcgaggtctccttgtacttgtccttcatgtcggcaccggtcgacatcatcgtggcgcacacctcatcgaggctcaccagctggcgtccgtcgccggccaacgccaggcgggccgcggtgatggcggtcacggcacccacggcgttgcgttcgatgcagggcacctgcaccaggccacgcaccggatcgcaggtcagtcccaggtggtgctccatgccgatctcggcggcgttgcacacctgctgcggagtgccacccgccacctgtgccaggctcgcggccgccatcgaacaggccacccccacctcgccctggcagcccacctccgcccccgagatcgaggcggtctgctggaacaccatgccgatggccccggcggtgagcaggaagttcgcgacgagccgctcgtcgtcacgcagcccgtcggggctggcgaaggtgagcacatgcttgagcacggccggcacgatgccggcagcaccattggtcggtgcggtcaccaccctgccgccgacggcattctgctcattcaccgcgatcgcccaagccgacacccagtcgaggccggccagcgggtcatatccggtctggcggcggttcatcaggtcggaatgcagcttgtgggccctacggcgcacgcccagcccgccgggcagctcgccggtggccccacagccgtcggtgatcgactggtccatcaccgtccacaggcccatcagcttctcgcgcacctcgtccttcgagtagccgtgcgccatctcgttggccagcaccacctgcggaatcgacatgccgctggccgcgcagatattgagcagttccgcgccgttgcggaagggatggggcacccgggtctcgtcgcggggcatcggcggctccccggtgccgtcatcgcgcaccacgaagccgccgccgatcgaataccagacctcgttgtgcagttcctgggtggcatcgtcgtcgcgataggcggtcagcgacagggcattggggtggaagcgcagccggcggcgtccctccatgaccaggtcggtgatggggttgaacacgatggtgcgcgctgcggattcgctggtcgacgcgagcgtcagcgtgtgatcggccgcggcacgtgccatcagccgggccggtagctccgggtcgacggtgtcgggatgctcccccgccagtccggcgagcacggcgcggtcggtgccatggccacggccggtggcccccagcgagccgaacagcttgatgcgcacccggtgcacctggtcgagcaggccgtcggcctgcaggttctcgaggaagccgaccccggcccgcatcggacccaccgtgtgtgagctcgaggggccgatgcccacggtgaacatgtcgaatacgctcactgccatgtgaccattgttcacgccgaggggcgggcgcaccagatgcgtgccggaatggccgcatccgcgacgtgcccggcgcttgttcggacgagcgatggtccgtcgtggccggggagcagctgcccggccgtgggacactggggacgaggagaccaccatgacttctggccgggccgggacacaccgcgacgacgcgtcgacgcctgatccacgcgaacacaatccatccggcgctgcgcccgcgcccttcgacgagcaggcgctgcatgccgagatctccgcgctggcaccccagatggtggccgaccggcgacacctgcacgcccaccccgaggtgagcctgcatgagttcaacaccgcggccttcatcaaggcgcgcctcgacgagctcggcatcgccgcggaaccggtgggcgagaccggcctgctcgccaccctgccggggcgtggccccggccccaccatcatgttgcgggccgacatcgacgcgctgccgctgcgtgacggctgcggagccgagtgggccaataacgccagcgaggtgaaccacgcctgcggacatgatggccacatcgccgccctgctggctgcggcgcgcgtgctcgccggccacagtgccgacttcgacggcaccatcaagttcgccttccaacaggccgaggagatcggggccggaggccgcatcttcgaggaggccggcgccctggagggccttgaccaggtgttcgggctgcacctgttctcgggcctgcccaccggcgtcgtcagcgccacgcccggcgcgcagtgggccagcgtcgaccagttcaccatcgacgtcaccggcgtcggtgggcatgtgtccaccccgcagctcagccatgacgcactggtggccggggcaagcatcgtcaccgagatccagcagatcgtggcgcgcgaactgagtcccttcgacgaagtggtcgtcggcatcgggcgcttcaactccggggagaactacaacatcatcgccagctccgcgcggctcgagggcacggtgcgggcgttcgacgaacaggtgcgcgagcacgtgctcgcctccatcgagcgcatcgccgtgtcggtggccgcggcccaccagaccaccgccgaggtgcgccggcaggtgttcgccgatgtgttgtccaacgatcccggggccacgcacttcgcggcgcgggtcgcccagcagatcccgggtgtcgagcgggtcgagactaatacccccaaggcggccatgggcgacgacttcgccgtcttcctgcaccatgcgccgggcgtctacgcccgcgtcggcagtgggggagcgccccagttcgagcagccgcaccactcatatgcctttgcgatcaacgaggcctcgttgcccatcgctgccgagttgcacgccagctatgcattgcgctggctggccggtggccatcagggctgagtccccggacgggacgtcggcgcgggctgtccacgggcacggtgggggagcgcatgccgggtaacctgcagtggtgagtgacgagcagagggaccgcgccgccgataccccgcaggcatcgggccccgcggggaacgccggggcaaccgggccattgcccgcccgcgtcggtgccccgcagtcggaggccgcagaagcacagggtgcgcccgtcaccgccatggcccccgaccaaccgaacggccctgaccaaccgaacggctccggccaaccgcatgttgccgaccagtccgcgacgtcggacgagccggaatggtggcaggacgattccatgccctggaagcacaagccggggcgctccgacatcgcctgcctggcctggctgggtggcctaggcgtgttcagcatgctcatgctcccgctgcgcgcctggctgatgggctcgcccgaccgcatcccgctgctggtggcactcaccggcagccgcaccggcaccgcgatgctgggtgccgtcgtgcgcaccggcgactacgccgtgagctgggacctgggcggtcacctcatcgccatctcatgggtctggccgatgatcgccgcggtgatcatgagctgcaagttcgactggatctattggtgggccggcaagctgtggggccgcggcatgatcgaggtctgggccggcaagtcggagcgtgcgcgacgccgctacgaacgcttggagaagtgggccgggaaggtcggatggctcgccttcgtgctggcctacctgcccgtgccgctgccgctgatggccgtcgtgttcgtgctggcaggtgccagtggcatgcgcctgagacgcttcgtggtcctcgacgtcgtggtgtgttcctgctggaccgtcgtgttcggcgtgctcggctatgtggtgggcacacccatcaccgacgtgctgaacgtctattcgaaggtcgccaactatgtgaccatcgggttggtggtgctggtggtggcctggtcgatcatcggttcggcccggaaggcccgcacggcgctgcacgagcacgcctagggcgcaggccgcgcgccgcgaccctcagccctgcagtgccttgtcataggcaactcgggccgactcggagaaggccaccaacagggcccgttccaccgaggtccgcgtctggcgcagtgtggtcacggcgatgcgcgtcgcatcgtccatcggccagccgtagacgccggcggagatcgtcgggaaggcgatcgaatgcacgcccagctcgtcggccacgcgcaggcactggcggtagcagctcaccagcagcgccgagcggtcctcggtgcgcgaatagaccggccccaccgtgtggatcacccaggtggccgggagcttcccggccgtcgtggccacggcctgacccgccggcagtccgtcgggcagcgacgtcgcccgcaactggcggcaggccgccaggatcgccgggccgccggcgcgatggatcgccccgtccacgccgcccccgcccagcagcgatgagttggcggcgttcacgatggcgtccacccgcagccgggtgatgtcgccctgcacgatctcgatgtccatgcccccagtgtgcttcagatccgcgccgcgagtgccggggcggtagcgtctacaggagtcatcattgatttcgacggaggcagtatgaatctggagaaggtcgtcttcggctttttcgtcacccttgccgctgccctgaacctgggtttcttctatggccgcatcgacgatccagcgctgcacaacggctatgagctcgcggctgcgctggtggtcagcttcatcaccacggtgctgaagttcggcgaccgcacccagctcggtgccgtgcacctggcgaccagcctggtggccgacctgcagctcgtggtggccgccgtcatctgggtctgggccacgcagatcgtggccaccaccatgacgccgggtcacatctcgctgatcgtgtcgatgtcgggtggagccctgctggccaacctcgtctcggtgatcctgatgatcagcgagatcgtgcagattcgtcgctagccgcccatgcccgccagcagcacacggttgaagcgtcccggtggcctcaccgacgtcttctacctgatcatgcgcaggatgcgcttcccgctcatcctgctcatcgtgatctacaccatctgtacggtcggcctggggttgatccccggcgtcgacgacgcagggaatcccaccccggcgatgggcctgttcaacgccttctacgtggtgagctacaccggcgccaccatcggcttcggcgagatcccgcagccctattcggcggcgcaacgcatgtggatgaccatgaccatctacatgaccgtggtgggttggtcatattcgctggtcaacatcctcgccctggtgcaggagcgggcgttccagaatgcgctgcgccaggcacgcttcacccgacgcatctacgggctgcgtgagcccttctacatcgtggcgggcgccggcgagacgggggccctggtgtgccatggcctcgatcggctcgggctgcgcttcgtggtggtggagcgcaacgaggagcgcctcgcgcgcatgcgcctggaggagttccgctccgatccgccgctcatcgtggccgacgccagccagccctcggtgatgcgcgatgccggcctggtgtccccgcattgtcgcggggtgctggcgctcaccgaggacgactccaccaaccaggcgatcgcggtcaccacgcgcctgttggccccgcgggtggtggtgctggcccgcatccgcaatgtggagaccgagacgcatgtgggggtcttcggtggcgacctggtgatcaatcccttcgagcgctttgcgcggcagctggcgtcgtcgatcatcgcccctgagcgctaccggctgcgagagatcctcaccggactggtcggcgagcccgttcccgaccagcgccaaccgccccgcgggcactggatcatgtgcggctatgggcgtttcggccacgccatggtcgaggagctgcgctccaccggcatcgaggtgacggtgatcgacgaggcccacttcgaccagggcggcgtcgacgtgcgcggcaccggcaccgattccgagagcctcatcgccgcgggggtgaagacggccgacggcatcgtggccggcaatgcgtcggacacgaagaacctggccatcgcggtgacggcccgcgagctgaatcccggcatcttcatcgtcacccggcagaaccagaccgccaacacacccctgttcgacgccttcctcgacgacctgtccatggtcccgagccatatcgtcgcccaggagttcctggcccgcatcaccaccccgttgttggggcagtacctcaagcgcatcgaccagtacagcgagaaggaatgcgccgtcctgtctgatcggctcacgcgcttcggccgggggcgcatcccggagttgtgggacgtcgtcatccggcgtggacaggccacggccgtgtcgcagcgtctggcctccggccaccgggtcaccctggccgatgtgctcaccgatcccgacaagcgcacccagcgcagcgaggcggcggcgctgatggtgcgtcgcggcaacaagtcgatggaacgtcccgaactcacgatggaattgcgtcccgacgaccgcatcctgttcgccggttcgacgcagggccacggcaatgtgtccctggtgctgcagaacgcgaatgcgctgggctatgtgcagaccgggcaggagggcaatggcggggtggtgtggcgctggatcaccggccaacgccgccagtccgaggagctgcacgaccatgatgcggtgcctccccaggagggtgcccgcgccctggcggcgaagcaacgcgtggcccgcgccaaggccgccaaggcgaaggctgccaaggcgctgtcgggcaagcccggtggcaggccgggccgtgatgcccggggagcgcagtccgggtccgacgggcgcgtcaacgccgtgggcgggcgatccgggcaggggataccggttccctgtggcgacgggccgacaagcgccggtaacggtgtcccggccgcacccgcgcaggacactccaggcgcgcccccgaaggatgatccggcacggcagccggaggccgacgccgggcatggcacggcgtccaccggggacgacaagggcaccggtcccgagccgtccgcgtccgagcaccactgacctgcgcacggatctgcgtacggatctgggcccggacctgcgcagggacctgggcccggaccgcgcgcccgtccgaggcccgggcggcccggcagtccggcggggtcgggtcccagtggctcagtggtgcagctggaagcgctcgtagaccttccgcaggggccgcggcgcccaccagttccagtggccgagcaccgtcatcgtgctgggcaccaggagcagccgcaccagggtggcgtcggtggccaccatgattgccagtgcgacgccgagctccttgatggccagcatctcgcccgagacgaacccgaggaacaccgcgatgatgatcgccgccgccgaggtgatgatgcgtcccgaccgttggagtccacgggccacggcctcgttgttgtcgtggccggcttcccagtactccttgatgcgcgccagcaggaacacctcgtagtccatcgccagcccgaatccgaaggccagcatgcacgccacgatgaaggtctccagcccgttcacctgtggcagtcccaggtggccgccctcgaacagccaggccgtcactcccaaggaggccaccagcgacaggctgttgatgagcagcgccttgaggggcacgatcaatgacccggtcatgaggaacagcagcaccagcaccgagaccacgatgatcaacgctgaccacggtgcgccctgggccagtgagtggttgaagtcgatctgcgaggccgccgcgccgcccacccagatccggtatccggggtcctcgccccgcagggtgcgcaccatgtcgctcacctcggggcccacctggtcggacgcgtcgacccgcacgtcgatgcgcgtcagcccgggcttgtccgccagcgcgccggggctcacccgggtgacgtgggcaaggtcctcgatctgtgacaccagggcgccggttcgttccggtggcgcctcggcaatcagggtgatcgacggcgtcgccatcgccggatactgcgactgcagggtgtcgtagccggttcggatcatcgagttggccggcatgtagtcggtgaacgcggtgcgcagccgcagcgtgccgatcggggaggccatcagcgccaggatggcgctcaccaccaccatgatgatccacgggtgcgcgatcacccggtgggcgagcttgtggaaggcaccggtgtcactcgacgcatcgcccaccgcccgcaccaacccgcgcagtccgggcacccgtgccagcaccgagggccgcaccatgtgcgagcccaacagggtgatgatcgccgggatgagcgtcaccgcgctgagcacggcgatcaccgtcacgatgatgccgcccagggcgatcgtcttgaggatggacgaacgcatcaccagcagcccgccgatcgagaaggcgatggtcagcgccgagaacgacaccgtgcgtccggcggtctcgatcgaccgggccacgcactggcgcaccagctggtgcgtccggtgtcggtcggcggccactgccgcgtcggcgtcgaggcgttcggcgagttcctcgcggtagcggctcaccaccaatagcccgtagtcgatcgacagcgccaggccgatgatcgagatcacattgaggatgaacgaatcgatgcccatcacatgggtgaggagccacaggccacccatgccgacgccgatggaggtgagcgctccgaccagcggaagccctgcggcgagcagtccgccgaagacgatcaccagcagcaccagggccaccggtagcccgacgctctccccgcggatcaggtccttctgcaccaggtcgatgatcgagtcgccgatggcgcgggtcgacacctgataggcctcggccccggggaattgctcgtgcagcccgtcgagatagccgggcagggcggcatcgagtgcctcgtgggctgccgattgctgcttggcgtcaagccccgcatccagcgtgatcacctcggtgaacccgttcccgtcggcggccagcatcgcctgcgccgaggcctgtgccctggcggtcgcctcggccgcggcacgtgctgcggccggatcggcctgtgccagcgccggatccgtcccgggaacccgggccagcaccgagaaggcgtcggtgacggaggccacgtgctcgacgtcgagcttgtcgcgcagcgtggcgaccaactcgccagcctgcgcccggtgcgtccgcacgtcgacgccggtcaccacgatcgtcaccgtggtcgacgatccccgggcctcggccacggtgtcggcgacgtgctgtgagtcggtgtcgggcacattggtctcgctgctggtcagccgggagaacaggttctggccaccccatccggtgagcgccaggcttcctgtgatgcccagcaccaccgcccagatgaggacgaaggccagtgggtggcgggacacggccctgccgatgcgagtgaacaactgagtctcccaatgcgcggctgccatagccggacggtccgctcaggataacaccgggtttcgtgatggctccggccccgaggggccgcccatcggcctgcggaaggagccccggtgggggtcgaaatgacagccaacccacagcgacgcctgacggtgaccacaatcacgctgcgcacaatgggaactgctcccggggaaggccggatggacggcaaggacaagccgggagtccaaaacttggggcgtcgggtctggtgggtgatccggcgccccattcccctgtccgggacgagccggtccacatggagcccccggagggagtcgaaccctcgacccttcgcttacaaggcgaatgctctggccgctgagctacggaggcgtgccggttggtcaacctgcgttgacccgatctgcaagggcccaacgtgccagggcccaggctgcgggcaccattgtgcctgccgggccattctgcccgccagccgcgtccggcgcgaaccggcgacgggggactagatcgcctcgtggaggccgggggccgccaggaatgccaggcaacttcccttgagggtgacgtcctcgccggcgtcgaagaaggccgactggccctgcacgagttcggccttgtgctggccccgggcgtccatcacgtcaacatggccctcgatcaccagcaggatgcgcgacatctgctgggcgggcagggtcaccgtgcggtcgggcgacaattcggcgcgccacagggcgaactgctcgtcgggcgtctggtagcgggccaggccaccaccgacgggggtcggggtgatgatctgcggcgtgctcgggctgaagtccagcaggtccaccagggccttcacgtcaatgtgcttgtgggtcagcccgccccgcaccacgttgtcggagcttgccatgatctcgattccggtgccctgcacgtaggcgtgcagcacatcggcctgcacccgcagtccctgccccggcttcagcgtgaagtggttcagcagcagggccgcgaggatgcccgggtcgctggggtagaactcgtcgaggcgcagtgccaggcgggcgaagtcgccgagcggcgacttgtcgtgctcatggggcagcgccgcggcgagcaccccgttcaccatggccttgtgctcgtcgtcgggacacaggcattcgaggaacacctcggccaggcccgcctcggcgccgcggtggcgcagcgggccgatcaacgattccaggggttcgcgcggctgcagctcgtcgaacagggccacggtgcgcttgggatcacggaagccggccagcgcctcgaaggggctcagcgccaccagcacctccggcttgggccaggtgtccttgaaggtgcgcttcgggtcgtccaccggcaccccgcgtgcttcctcggcggcgaatccggcctcggcctgttccgcggagggatgtgcctgcaggctcagtggctgggtggcggcgaggatcttcatcaggaagggcagcttgccgccgaagcgctcattcaccgggccgcccaacaactgcggttcatcggccagtagccggtccagggtggtgccgtccaccttggcaggtgcggagtcgtgcgcgcccagccagtactcggcctgcggcgtctcatcgggcacggtgccgaggatggctggaatggctgtgggtgatccccaggcgtagttcttcacgatgcctgtcagagatcgcatgctcttccttctctcaggtcctgcgtttccaggtcctgctttcgggccttctgtggcgatgtcgtgctccgcgatggccgcacccctcaccggtccggcgctgtccatcatgtcagttggaggccccggccgggcaatatccccagccgccgccgcgggccgtgtcgccggttccacaggctttcagaccatgggcggtgagtcgttagactgcgggtatgccccaggtagcacacgacgcgcagagcggccccgagttgtcgccgcgcgacatcgcgatcctcgacttcgagaagacctggtggaagtcacgcgtctccaaggagcaggagatccgggaacgcttcgacctgtcgaccccgcgctattacctgatcctgaactcgctgatcgaccgtcccgaggccctggcccacgatccgctgttggtgaagcgactgcgtcgcctgcgtgagcagcgccaacgggagcggtcggcgcaccggctgcacaaggcctagcgcccccggggcagtgattgcccttgtcgacgccgcaacggcggtgcaacgggccctcgtcccgacgttcgggcgtcccccgaagtgcctgcggggccatccatggttgagtcggggcggctcaagtccacgtcagacctttgcactcgcttcggtcgagtgctaaaaatggtgttagcactcggcgtggctgagtgccacgcagggaatcgagggtgaggccggaaaccggtcgtccgtcgcgggcaccatcattcccctccgacaagtacccgggggccgttggccctcgccaacatacgaagcgccggcagtctgcggcgcgggaggattcccaccaacaatggcaaagcttattgaattcgacagcgaggcccgccgcggccttgaagagggcatgaacaccctcgcagacgcggtcaaggtgacgctcggccccaagggtcgcaatgtcgtgttggagaagtcgtggggcgcccccaccatcaccaacgacggcgtctcgatcgccaaggagatcgagcttgctgacccctaccacaagatcggcgctgagctggtcaaggaggtcgccaagaagactgacgacgtcgccggcgacggcaccaccaccgcaacggtcctggcacaggcaatggtccgcgagggcctgcgcaatgtcacggccggtgccaaccccatcgagctgaagcgtggcattgagaaggccaccgaggccatcagcaagcagctgagcgcgatggccattgacgtcgagacgcgcgagcagatcgcccagaccgcgtcgatctccgctggcgatgagtccgtcggcgagcagatcgccgaggccatggacaaggtcggcaaggaaggcgtcatcaccgtcgaggattcgaacaccttcggcctggagctcgagctcaccgagggcatgaacttcgacaagggctacatcagcccctacttcgtcaccgacaccgagcgcatggaagccgtgctcgacgatccctacatcctgatcgtcgacggcaaggtcagctcgttgaaggacctgctgcccatccttgagaaggtgcagcagacgggcaaggcgctcctggtgatcgccgaggacgtcgatggtgaggccctggccggcctgatcgtcaacaagatccgtggcaccttcaagagcgtcgccgtcaaggcccccgccttcggtgaccgtcgcaaggccatgctcggcgacatcgccaccctcaccggtggccaggtcgtttccgagaccgtgggcctgtcgctcgacaccctgcccgtggaaatgctcgggcgtgcccgcagcatcaccgtgagcaaggacgccaccaccatcgtcgatggcgctggcgacaaggaccagatccagggccgcatcaagcagatccgcaacgaaatcgagaactctgattccgattacgaccgcgagaagctgcaggagcgcctggcgaagctggccggcggcgtggccgtcatcaaggtcggcgcagccaccgaggtcgaggcctccgagctgaagcaccgcatcgaggatgccgtgcgcaacgccaaggctgccgtcgaagagggcatccttcccggcggcggcgtggccctgatccaggcggccaaggccgccacgctcgagggcctcacggctgacgagcagatcggtgccgagatcgtcttcacctctgccgaggctccgctgaagcagattgccaccaatgccggcctcgagggcggcgtcgtggcagagaaggtgaagggcctcaagcccggcgagggcctgaacgcggctaccggcgagtacgaggacctggtgaaggccggcgtcatcgatccggccaaggtcacccgctccgcgctggtgaatgcctcgtcgatcgccggactgttcctcaccactgaggcagtcatcgccatcaagcccgagccgaagcctgctgctccggccggcgctggtgacgagatgggcggcatgtactgatagacggtatgtgcaggtagctgcatggacaggtgacaggtcggttgcacggatggtggatacccaccagatggtgacaacgccctcgcccccgacatgcgggctacatcgcatcacctgaacgacgagtgcacgcgtggttggtgcacgacaagcggtggggtcggctcttcggagtcggccccaccgctttgtcgtgggccggtcttgtcagaggacctagccttcggggtccgctagttgtgggggatcccgcgaggaggtgtccggggccggctgtgcccggggaccctgtcttgtccgtgggagcgtcccgtccgggggctgtcgtgcctcggcgaccgtcttccacctgcacctgctcctataggaggccctgcgttactgaccaccgcgtcgtggacggcatcaccgcctgagtcggtgctccgccggatccaccgcgcggcgcgacagctacgaccatctcagggctcgcccctcactcaacgccacaacgtgtccggagagaacacgctgggacacccgtgttggtctccaccggcgcggggacgtgccgggcagggagtcagcgcaccttcccccagggaggggacgccacagccggtaggggccgcgcactccccatgccagcagggacgggcagaagcgcgctcgcccttgtgggtcgccgcgcgccccgggccaccctggtgtggctctgttcccgcagaccgcatgcgggggcagaggcaggggcagacagcaggtagcggccagtagggggggtggacgcgggaagggagcccccgcgagcgatcgtcccagggccgttcggagggggtgggacctctcatttgacatctgctgcaggagcacgtaatgttgtccgagctgccgcagggtggttcacaactcaacaaagggcctgaatcaagggctgagtgccaagtgcataaagcctgagaattgagcccgacaaagacggttcaccggatttgatttgttggtgtgaatgctctacgatagttaagtcacctcgagttggtgcctgaaggaagtttttgggtgttggttcgtgtgtgtccgtttcttgagaactcaacagcgtgtctttttatagtcaatgattttattttgtttccgtgatcgttgatggtcctgctttggtgggattgttgatggttttggattcctttgtagtttgtattatttgattgagtccagtttttgggcttggtcaggttctactttttgttgacggtttctgctgtggtcctgtccttttggggtggggttgtggttgtgccgatattttttcaacggagagtttgatcctggctcaggacgaacgctggcggcgtgcttaacacatgcaagtcggacggtaaggcccctttcggggggtacacgagtggcgaacgggtgagtaacacgtgagg

SEQ ID NO: 8 - DNA, 19 bp, synthetic construct
  source 1..19: mol_type = other DNA
attccatcgccctgaagga

SEQ ID NO: 9 - DNA, 20 bp, synthetic construct
  source 1..20: mol_type = other DNA
ttgatctgcgtcttctggcc

SEQ ID NO: 10 - DNA, 18 bp, synthetic construct
  source 1..18: mol_type = other DNA
tcgcgtcyggtgtgaaag

SEQ ID NO: 11 - DNA, 17 bp, synthetic construct
  source 1..17: mol_type = other DNA
ccacatccagcrtccac

SEQ ID NO: 12 - DNA, 19 bp, synthetic construct
  source 1..19: mol_type = other DNA
agcagtagggaatcttcca

SEQ ID NO: 13 - DNA, 23 bp, synthetic construct
  source 1..23: mol_type = other DNA
cgccactggtgttcytccatata

SEQ ID NO: 14 - DNA, 2656772 bp, Propionibacterium freudenreichii; identical to SEQ ID NO: 7
  source 1..2656772: mol_type = genomic DNA
